(19) United States
(12) Patent Application Publication
(10) Pub. No.: US 2006/0029940 A1
(43) Pub. Date: Feb. 9, 2006

(54) Prostate stem cell antigen (PSCA) variants and subsequences thereof

(76) Inventors: Wangmao Ge, Los Angeles, CA (US); Pia M. Challita-Eid, Encino, CA (US); Arthur B. Raitano, Los Angeles, CA (US); Aya Jakobovits, Beverly Hills, CA (US)

Correspondence Address: MORRISON & FOERSTER LLP, 3811 VALLEY CENTRE DRIVE, SUITE 500, SAN DIEGO, CA, 92130-2332, US

(21) Appl. No.: 10/857,484

(22) Filed: May 28, 2004

Related U.S. Application Data
(60) Provisional application No. 60/475,064, filed on May 30, 2003.

(51) Int. Cl. C12Q 1/68; C07H 21/04; C12P 21/06; C12N 15/09; C07K 16/30; C07K 14/82

(52) U.S. Cl. 435/6; 435/69.3; 435/320.1; 435/325; 530/350; 536/23.5

(57) ABSTRACT

PSCA and its encoded protein, and variants thereof, are described wherein PSCA exhibits tissue specific expression in normal adult tissue, and is aberrantly expressed in the cancers listed in Table I. Consequently, PSCA provides a diagnostic, prognostic, propylactic and/or therapeutic target for cancer. The PSCA gene or fragment thereof, or its encoded protein, or variants thereof, or a fragment thereof, can be used to elicit a humoral or cellular immune response; antibodies or T cells reactive with PSCA can be used in active or passive immunization.

### CROSS-REFERENCE TO RELATED APPLICATIONS

[0001] This application claims benefit of U.S. provisional application 60/475,064 filed 30 May 2003. The content document are incorporated herein by reference.

### TECHNICAL FIELD

[0002] The invention described herein relates to genes and their encoded proteins, termed PSCA, expressed in certain cancers, and to diagnostic and therapeutic methods and compositions useful in the management of cancers that express PSCA.

### BACKGROUND ART

[0003] Cancer is the second leading cause of human death next to coronary disease. Worldwide, millions of people die from cancer every year. In the United States alone, as reported by the American Cancer Society, cancer causes the death of well over a half-million people annually, with over 1.2 million new cases diagnosed per year. While deaths from heart disease have been declining significantly, those resulting from cancer generally are on the rise. In the early part of the next century, cancer is predicted to become the leading cause of death.

[0004] Worldwide, several cancers stand out as the leading killers. In particular, carcinomas of the lung, prostate, breast, colon, pancreas, and ovary represent the primary causes of cancer death. These and virtually all other carcinomas share a common lethal feature. With very few exceptions, metastatic disease from a carcinoma is fatal. Moreover, even for those cancer patients who initially survive their primary cancers, common experience has shown that their lives are dramatically altered. Many cancer patients experience strong anxieties driven by the awareness of the potential for recurrence or treatment failure. Many cancer patents experience physical debilitations following treatment. Furthermore, many cancer patients experience a recurrence.

[0005] Worldwide, prostate cancer is the fourth most prevalent cancer in men. In North America and Northern Europe, it is by far the most common cancer in males and is the second leading cause of cancer death in men. In the United States alone, well over 30,000 men die annually of this disease—second only to lung cancer. Despite the magnitude of these figures, there is still no effective treatment for metastatic prostate cancer. Surgical prostatectomy, radiation therapy, hormone ablation therapy, surgical castration and chemotherapy continue to be the main treatment modalities. Unfortunately, these treatments are ineffective for many and are often associated with undesirable consequences.

[0006] On the diagnostic front, the lack of a prostate tumor marker that can accurately detect early-stage, localized tumors remains a significant limitation in the diagnosis and management of this disease. Although the serum prostate specific antigen (PSA) assay has been a very useful tool, however its specificity and general utility is widely regarded as lacking in several important respects.

[0007] Progress in identifying additional specific markers for prostate cancer has been improved by the generation of prostate cancer xenografts that can recapitulate different stages of the disease in mice. The LAPC (Los Angeles Prostate Cancer) xenografts are prostate cancer xenografts that have survived passage in severe combined immune deficient (SCID) mice and have exhibited the capacity to mimic the transition from androgen dependence to androgen independence (Klein et al., 1997, Nat. Med. 3:402). More recently identified prostate cancer markers include PCTA-1 (Su et al., 1996, Proc. Natl. Acad. Sci. USA 93: 7252), prostate-specific membrane (PSM) antigen (Pinto et al., Clin Cancer Res Sep. 2, 1996 (9): 1445-51), STEAP (Hubert, et al., Proc Natl Acad Sci USA. Dec. 7, 1999; 96(25): 14523-8) and prostate stem cell antigen (PSCA) (Reiter et al., 1998, Proc. Natl. Acad. Sci. USA 95: 1735).

[0008] While previously identified markers such as PSA, PSM, PCTA and PSCA have facilitated efforts to diagnose and treat prostate cancer, there is need for the identification of additional markers and therapeutic targets for prostate and related cancers in order to further improve diagnosis and therapy.

[0009] Renal cell carcinoma (RCC) accounts for approximately 3 percent of adult malignancies. Once adenomas reach a diameter of 2 to 3 cm, malignant potential exists. In the adult, the two principal malignant renal tumors are renal cell adenocarcinoma and transitional cell carcinoma of the renal pelvis or ureter. The incidence of renal cell adenocarcinoma is estimated at more than 29,000 cases in the United States, and more than 11,600 patients died of this disease in 1998. Transitional cell carcinoma is less frequent, with an incidence of approximately 500 cases per year in the United States.

[0010] Surgery has been the primary therapy for renal cell adenocarcinoma for many decades. Until recently, metastatic disease has been refractory to any systemic therapy. With recent developments in systemic therapies, particularly immunotherapies, metastatic renal cell carcinoma may be approached aggressively in appropriate patients with a possibility of durable responses. Nevertheless, there is a remaining need for effective therapies for these patents.

[0011] Of all new cases of cancer in the United States, bladder cancer represents approximately 5 percent in men (fifth most common neoplasm) and 3 percent in women (eighth most common neoplasm). The incidence is increasing slowly, concurrent with an increasing older population. In 1998, there was an estimated 54,500 cases, including 39,500 in men and 15,000 in women. The age-adjusted incidence in the United States is 32 per 100,000 for men and eight per 100,000 in women. The historic male/female ratio of 3:1 may be decreasing related to smoking patterns in women. There were an estimated 11,000 deaths from bladder cancer in 1998 (7,800 in men and 3,900 in women). Bladder cancer incidence and mortality strongly increase with age and will be an increasing problem as the population becomes more elderly.

[0012] Most bladder cancers recur in the bladder. Bladder cancer is managed with a combination of transurethral resection of the bladder (TUR) and intravesical chemotherapy or immunotherapy. The multifocal and recurrent nature of bladder cancer points out the limitations of TUR. Most muscle-invasive cancers are not cured by TUR alone. Radical cystectomy and urinary diversion is the most effective means to eliminate the cancer but carry an undeniable impact on urinary and sexual function. There continues to be a significant need for treatment modalities that are beneficial for bladder cancer patients.

[0013] An estimated 130,200 cases of colorectal cancer occurred in 2000 in the United States, including 93,800 c of colon cancer and 36,400 of rectal cancer. Colorectal cancers are the third most common cancers in men and women. Incidence rates declined significantly during 1992-1996 (-2.1% per year). Research suggests that these declines have been due to increased screening and polyp removal, preventing progression of polyps to invasive cancers. There were an estimated 56,300 deaths (47,700 from colon cancer, 8,600 from rectal cancer) in 2000, accounting for about 11% o cancer deaths.

[0014] At present, surgery is the most common form of therapy for colorectal cancer, and for cancers that have not spread, it is frequently curative. Chemotherapy, or chemotherapy plus radiation, is given before or after surgery to most patients whose cancer has deeply perforated the bowel wall or has spread to the lymph nodes. A permanent colostomy (creation of an abdominal opening for elimination of body wastes) is occasionally needed for colon cancer and is infrequently required for rectal cancer. There continues to be a need for effective diagnostic and treatment modalities for colorectal cancer.

[0015] There were an estimated 164,100 new cases of lung and bronchial cancer in 2000, accounting for 14% of all U.S. cancer diagnoses. The incidence rate of lung and bronchial cancer is declining significantly in men, from a high of 86.5 per 100,000 in 1984 to 70.0 in 1996. In the 1990s, the rate of increase among women began to slow. In 1996, the incidence rate in women was 42.3 per 100,000.

[0016] Lung and bronchial cancer caused an estimated 156,900 deaths in 2000, accounting for 28% of all cancer deaths. During 1992-1996, mortality from lung cancer declined significantly among men (−1.7% per year) while rates for women were still significantly increasing (0.9% per year). Since 1987, more women have died each year of lung cancer than breast cancer, which, for over 40 years, was the major cause of cancer death in women. Decreasing lung cancer incidence and mortality rates most likely resulted from decreased smoking rates over the previous 30 years; however, decreasing smoking patterns among women lag behind those of men. Of concern, although the declines in adult tobacco use have slowed, tobacco use in youth is increasing again.

[0017] Treatment options for lung and bronchial cancer are determined by the type and stage of the cancer and include surgery, radiation therapy, and chemotherapy. For many localized cancers, surgery is usually the treatment of choice. Because the disease has usually spread by the time it is discovered, radiation therapy and chemotherapy are often needed in combination with surgery. Chemotherapy alone or combined with radiation is the treatment of choice for small cell lung cancer; on this regimen, a large percentage of patients experience remission, which in some cases is long lasting. There is however, an ongoing need for effective treatment and diagnostic approaches for lung and bronchial cancers.

[0018] An estimated 182,800 new invasive cases of breast cancer were expected to occur among women in the United States during 2000. Additionally, about 1,400 new cases of breast cancer were expected to be diagnosed in men in 2000. After increasing about 4% per year in the 1980s, breast cancer incidence rates in women have leveled off in the 1990s to about 110.6 cases per 100,000.

[0019] In the U.S. alone, there were an estimated 41,200 deaths (40,800 women, 400 men) in 2000 due to breast cancer. Breast cancer ranks second among cancer deaths in women. According to the most recent data, mortality rates declined significantly during 1992-1996 with the largest decreases in younger women, both white and black. These decreases were probably the result of earlier detection and improved treatment.

[0020] Taking into account the medical circumstances and the patient's preferences, treatment of breast cancer may involve lumpectomy (local removal of the tumor) and removal of the lymph nodes under the arm; mastectomy (surgical removal of the breast) and removal of the lymph nodes under the arm; radiation therapy; chemotherapy; or hormone therapy. Often, two or more methods are used in combination. Numerous studies have shown that, for early stage disease, long-term survival rates after lumpectomy plus radiotherapy are similar to survival rates after modified radical mastectomy. Significant advances in reconstruction techniques provide several options for breast reconstruction after mastectomy. Recently, such reconstruction has been done at the same time as the mastectomy.

[0021] Local excision of ductal carcinoma in situ (DCIS) with adequate amounts of surrounding normal breast tissue may prevent the local recurrence of the DCIS. Radiation to the breast and/or tamoxifen may reduce the chance of DCIS occurring in the remaining breast tissue. This is important because DCIS, if left untreated, may develop into invasive breast cancer. Nevertheless, there are serious side effects or sequelae to these treatments. There is, therefore, a need for efficacious breast cancer treatments.

[0022] There were an estimated 23,100 new cases of ovarian cancer in the United States in 2000. It accounts for 4% of all cancers among women and ranks second among gynecologic cancers. During 1992-1996, ovarian cancer incidence rates were significantly declining. Consequent to ovarian cancer, there were an estimated 14,000 deaths in 2000. Ovarian cancer causes more deaths than any other cancer of the female reproductive system.

[0023] Surgery, radiation therapy, and chemotherapy are treatment options for ovarian cancer. Surgery usually includes the removal of one or both ovaries, the fallopian tubes (salpingo-oophorectomy), and the uterus (hysterectomy). In some very early tumors, only the involved ovary will be removed, especially in young women who wish to have children. In advanced disease, an attempt is made to remove all intra-abdominal disease to enhance the effect of chemotherapy. There continues to be an important need for effective treatment options for ovarian cancer.

[0024] There were an estimated 28,300 new cases of pancreatic cancer in the United States in 2000. Over the past 20 years, rates of pancreatic cancer have declined in men. Rates among women have remained approximately constant but may be beginning to decline. Pancreatic cancer caused an estimated 28,200 deaths in 2000 in the United States. Over the past 20 years, there has been a slight but significant decrease in mortality rates among men (about −0.9% per year) while rates have increased slightly among women.

[0025] Surgery, radiation therapy, and chemotherapy are treatment options for pancreatic cancer. These treatment options can extend survival and/or relieve symptoms in many patients but are not likely to produce a cure for most. There is a significant need for additional therapeutic and diagnostic options for pancreatic cancer.

### DISCLOSURE OF THE INVENTION

[0026] The present invention relates to a gene, designated PSCA, that has now been found to be over-expressed in the cancer(s) listed in Table I. Northern blot expression analysis of PSCA gene expression in normal tissues shows a restricted expression pattern in adult tissues. The nucleotide (FIG. 2) and amino acid (FIG. 2, and FIG. 3) sequences of PSCA are provided. The tissue-related profile of PSCA in normal adult tissues, combined with the over-expression observed in the tissues listed in Table I, shows that PSCA is aberrantly over-expressed in at least some cancers, and thus serves as a useful diagnostic, prophylactic, prognostic, and/or therapeutic target for cancers of the tissue(s) such as those listed in Table I.

[0027] The invention provides polynucleotides corresponding or complementary to all or part of the PSCA genes, mRNAs, and/or coding sequences, preferably in isolated form, including polynucleotides encoding PSCA-related proteins and fragments of 4, 5, 6, 7, 8, 9, 10, 11, 12, 13, 14, 15, 16, 17, 18, 19, 20, 21, 22, 23, 24, 25, or more than 25 contiguous amino acids; at least 30, 35, 40, 45, 50, 55, 60, 65, 70, 80, 85, 90, 95, 100 or more than 100 contiguous amino acids of a PSCA-related protein, as well as the peptides/proteins themselves; DNA, RNA, DNA/RNA hybrids, and related molecules, polynucleotides or oligonucleotides complementary or having at least a 90% homology to the PSCA genes or mRNA sequences or parts thereof, and polynucleotides or oligonucleotides that hybridize to the PSCA genes, mRNAs, or to PSCA-encoding polynucleotides. Also provided are means for isolating cDNAs and the genes encoding PSCA. Recombinant DNA molecules containing PSCA polynucleotides, cells transformed or transduced with such molecules, and host-vector systems for the expression of PSCA gene products are also provided. The invention further provides antibodies that bind to PSCA proteins and polypeptide fragments thereof, including polyclonal and monoclonal antibodies, murine and other mammalian antibodies, chimeric antibodies, humanized and fully human antibodies, and antibodies labeled with a detectable marker or therapeutic agent. In certain embodiments, there is a proviso that the entire nucleic acid sequence of FIG. 2 is not encoded and/or the entire amino acid sequence of FIG. 2 is not prepared. In certain embodiments, the entire nucleic acid sequence of FIG. 2 is encoded and/or the entire amino acid sequence of FIG. 2 is prepared, either of which are in respective human unit dose forms.

[0028] The invention further provides methods for detecting the presence and status of PSCA polynucleotides and proteins in various biological samples, as well as methods for identifying cells that express PSCA. A typical embodiment of this invention provides methods for monitoring PSCA gene products in a tissue or hematology sample having or suspected of having some form of growth dysregulation such as cancer.

[0029] The invention further provides various immunogenic or therapeutic compositions and strategies for treating cancers that express PSCA such as cancers of tissues listed in Table I, including therapies aimed at inhibiting the transcription, translation, processing or function of PSCA as well as cancer vaccines. In one aspect, the invention provides compositions, and methods comprising them, for treating a cancer that expresses PSCA in a human subject wherein the composition comprises a carrier suitable for human use and a human unit dose of one or more than one agent that inhibits the production or function of PSCA. Preferably, the carrier is a uniquely human carrier. In another aspect of the invention, the agent is a moiety that is immunoreactive with PSCA protein. Non-limiting examples of such moieties include, but are not limited to, antibodies (such as single chain, monoclonal, polyclonal, humanized, chimeric, or human antibodies), functional equivalents thereof (whether naturally occurring or synthetic), and combinations thereof. The antibodies can be conjugated to a diagnostic or therapeutic moiety. In another aspect, the agent is a small molecule as defined herein.

[0030] In another aspect, the agent comprises one or more than one peptide which comprises a cytotoxic T lymphocyte (CTL) epitope that binds an HLA class I molecule in a human to elicit a CTL response to PSCA and/or one or more than one peptide which comprises a helper T lymphocyte (HTL) epitope which binds an HLA class 11 molecule in a human to elicit an HTL response. The peptides of the invention may be on the same or on one or more separate polypeptide molecules. In a further aspect of the invention, the agent comprises one or more than one nucleic acid molecule that expresses one or more than one of the CTL or HTL response stimulating peptides as described above. In yet another aspect of the invention, the one or more than one nucleic acid molecule may express a moiety that is immunologically reactive with PSCA as described above. The one or more than one nucleic acid molecule may also be, or encodes, a molecule that inhibits production of PSCA. Non-limiting examples of such molecules include, but are not limited to, those complementary to a nucleotide sequence essential for production of PSCA (e.g. antisense sequences or molecules that form a triple helix with a nucleotide double helix essential for PSCA production) or a ribozyme effective to lyse PSCA mRNA.

[0031] Note that to determine the starting position of any peptide set forth in Tables VIII-XXI and XXII to XLIX (collectively HLA Peptide Tables) respective to its parental protein, e.g., variant 1, variant 2, etc., reference is made to three factors: the particular variant, the length of the peptide in an HLA Peptide Table, and the Search Peptides in Table VII. Generally, a unique Search Peptide is used to obtain HLA peptides of a particular for a particular variant. The position of each Search Peptide relative to its respective parent molecule is listed in Table VII. Accordingly, if a Search Peptide begins at position “X”, one must add the value “X−1” to each position in Tables VIII-XXI and XXII to XLIX to obtain the actual position of the HLA peptides in their parental molecule. For example, if a particular Search Peptide begins at position 150 of its parental molecule, one must add 150−1, i.e., 149 to each HLA peptide amino acid position to calculate the position of that amino acid in the parent molecule.

[0032] One embodiment of the invention comprises an HLA peptide, that occurs at least twice in Tables VIII-XXI and XXII to XLIX collectively, or an oligonucleotide that encodes the HLA peptide. Another embodiment of the invention comprises an HLA peptide that occurs at least once in Tables VIII-XXI and at least once in tables XXII to XLIX, or an oligonucleotide that encodes the HLA peptide.

[0033] Another embodiment of the invention is antibody epitopes, which comprise a peptide regions, or an oligonucleotide encoding the peptide region, that has one two, three, four, or five of the following characteristics:

[0034] i) a peptide region of at least 5 amino acids of a particular peptide of FIG. 3, in any whole number increment up to the full length of that protein in FIG. 3, that includes an amino acid position having a value equal to or greater than 0.5, 0.6, 0.7, 0.8, 0.9, or having a value equal to 1.0, in the Hydrophilicity profile of FIG. 5;

[0035] ii) a peptide region of at least 5 amino acids of a particular peptide of FIG. 3, in any whole number increment up to the full length of that protein in FIG. 3, that includes an amino acid position having a value equal to or less than 0.5, 0.4, 0.3, 0.2, 0.1, or having a value equal to 0.0, in the Hydropathicity profile of FIG. 6;

[0036] iii) a peptide region of at least 5 amino acids of a particular peptide of FIG. 3, in any whole number increment up to the full length of that protein in FIG. 3, that includes an amino acid position having a value equal to or greater than 0.5, 0.6, 0.7, 0.8, 0.9, or having a value equal to 1.0, in the Percent Accessible Residues profile of FIG. 7;

[0037] iv) a peptide region of at least 5 amino acids of a particular peptide of FIG. 3, in any whole number increment up to the full length of that protein in FIG. 3, that includes an amino acid position having a value equal to or greater than 0.5, 0.6, 0.7, 0.8, 0.9, or having a value equal to 1.0, in the Average Flexibility profile of FIG. 8; or

[0038] v) a peptide region of at least 5 amino acids of a particular peptide of FIG. 3, in any whole number increment up to the full length of that protein in FIG. 3, that includes an amino acid position having a value equal to or greater than 0.5, 0.6, 0.7, 0.8, 0.9, or having a value equal to 1.0, in the Beta-turn profile of FIG. 9.

### BRIEF DESCRIPTION OF THE DRAWINGS

[0039] FIG. 1. Intentionally Omitted.

[0040] FIG. 2.A) The cDNA and amino acid sequence of PSCA variant 1 (also called “PSCA v.1” or “PSCA variant 1”) is shown in FIG. 2A. The start methionine is underlined. The open reading frame extends from nucleic acid 18-389 including the stop codon.

[0041] B) The cDNA and amino acid sequence of PSCA variant 2 (also called “PSCA v.2”) is shown in FIG. 2B. The codon for the start methionine is underlined. The open reading frame extends from nucleic acid 56-427 including the stop codon.

[0042] C) The cDNA and amino acid sequence of PSCA variant 3 (also called “PSCA v.3”) is shown in FIG. 2C. The codon for the start methionine is underlined. The open reading frame extends from nucleic acid 423-707 including the stop codon.

[0043] D) The cDNA and amino acid sequence of PSCA variant 4 (also called “PSCA v.4”) is shown in FIG. 2D. The codon for the start methionine is underlined. The open reading frame extends from nucleic acid 424-993 including the stop codon.

[0044] E) The cDNA and amino acid sequence of PSCA variant 5 (also called “PSCA v.5”) is shown in FIG. 2E. The codon for the start methionine is underlined. The open reading frame extends from nucleic acid 910-1479 including the stop codon.

[0045] F) The cDNA and amino acid sequence of PSCA variant 6 (also called “PSCA v.6”) is shown in FIG. 2F. The codon for the start methionine is underlined. The open reading frame extends from nucleic acid 83-427 including the stop codon.

[0046] G) SNP variants of PSCA v.2, PSCA v.7 through v.18. The PSCAv.7through v.18 proteins have 123 amino acids. Variants PSCA v.7 through v.18 are variants with single nucleotide difference from PSCA v.2, and code for the same protein as v.2. Though these SNP variants are shown separately, they can also occur in any combinations and in any of the transcript variants listed above in FIGS. 2A through 2F.

[0047] H) SNP variants of PSCA v.4, PSCA v.19 through v.30. The PSCAv.19 through v.30 proteins have 189 amino acids. Variants PSCA v.19 through v.30 are variants with single nucleotide difference from PSCA v.4. PSCA v.9, v.10, v.11, v.24 and v.25 proteins differ from PSCA v.1 by one amino acid. PSCA v.23, v.28, v.29 and v.30 code for the same protein as v.4. Though these SNP variants are shown separately, they can also occur in any combinations and in any of the transcript variants v.3 and v.4.

[0048] FIG. 3.

[0049] A) The amino acid sequence of PSCA v.1 is shown in FIG. 3A; it has 123 amino acids.

[0050] B) The amino acid sequence of PSCA v.3 is shown in FIG. 3B; it has 94 amino acids.

[0051] C) The amino acid sequence of PSCA v.4 is shown in FIG. 3C; it has 189 amino acids.

[0052] D) The amino acid sequence of PSCA v.6 is shown in FIG. 3D; it has 114 amino acids.

[0053] E) The amino acid sequence of PSCA v.19 is shown in FIG. 3E; it has 189 amino acids.

[0054] F) The amino acid sequence of PSCA v.20 is shown in FIG. 3F; it has 189 amino acids.

[0055] G) The amino acid sequence of PSCA v.21 is shown in FIG. 3G; it has 189 amino acids.

[0056] H) The amino acid sequence of PSCA v.22 is shown in FIG. 3H; it has 189 amino acids.

[0057] I) The amino acid sequence of PSCA v.24 is shown in FIG. 3I; it has 189 amino acids.

[0058] J) The amino acid sequence of PSCA v.25 is shown in FIG. 3J; it has 189 amino acids.

[0059] K) The amino acid sequence of PSCA v.26 is shown in FIG. 3k; it has 189 amino acids.

[0060] L) The amino acid sequence of PSCA v.27 is shown in FIG. 3L; it has 189 amino acids.

[0061] As used herein, a reference to PSCA includes all variants thereof, including those shown in FIGS. 2, 3, 10, 11, and 12 unless the context clearly indicates otherwise.

[0062] FIG. 4. Alignment of PSCA v.4 with human Prostate Stem Cell Antigen (gi 27482160).

[0063] FIG. 5. FIGS. 5(a)-(c): Hydrophilicity amino acid profile of PSCAv.1, v.3, and v.4 determined by computer algorithm sequence analysis using the method of Hopp and Woods (Hopp T. P., Woods K. R., 1981. Proc. Natl. Acad. Sci. U.S.A. 78:3824-3828) accessed on the Protscale website located on the World Wide Web at (expasy.ch/cgi-bin/protscale.pl) through the ExPasy molecular biology server.

[0064] FIG. 6. FIGS. 6(a)-(c): Hydropathicity amino acid profile of PSCAv.1, v.3, and v.4 determined by computer algorithm sequence analysis using the method of Kyte and Doolittle (Kyte J., Doolittle R. F., 1982. J. Mol. Biol. 157:105-132) accessed on the ProtScale website located on the World Wide Web at (.expasy.ch/cgi-bin/protscale.pl) through the ExPasy molecular biology server.

[0065] FIG. 7. FIGS. 7(a)-(c): Percent accessible residues amino acid profile of PSCAv.1, v.3, and v.4 determined by computer algorithm sequence analysis using the method of Janin (Janin J., 1979 Nature 277:491-492) accessed on the ProtScale website located on the World Wide Web at (.expasy.ch/cgi-bin/protscale.pl) through the ExPasy molecular biology server.

[0066] FIG. 8. FIGS. 8(a)-(c): Average flexibility amino acid profile of PSCAv.1, v.3, and v.4 determined by computer algorithm sequence analysis using the method of Bhaskaran and Ponnuswamy (Bhaskaran R., and Ponnuswamy P. K., 1988. Int. J. Pept. Protein Res. 32:242-255) accessed on the ProtScale website located on the World Wide Web at (.expasy.ch/cgi-bin/protscale.pl) through the ExPasy molecular biology server.

[0067] FIG. 9. FIGS. 9(a)-(c): Beta-turn amino acid profile of PSCAv.1, v.3, and v.4 determined by computer algorithm sequence analysis using the method of Deleage and Roux (Deleage, G., Roux B. 1987 Protein Engineering 1:289-294) accessed on the ProtScale website located on the World Wide Web at (.expasy.ch/cgi-bin/protscale.pl) through the ExPasy molecular biology server.

[0068] FIG. 10. Exon compositions of transcript variants of PSCA. Variant PSCA v.2, v.3, v.4 and v.5 are transcript variants of v.1. Variant v.2 started transcription 47 bp further to the 5′ end than v.1. Variant v.3 had a shorter exon 2 as compared to v.2. Variants v.4 and v.5 had an alternative first exon. Variant 5 kept the second intron as compared to v.4. The order of the potential exons on the human genome is shown at the bottom. Poly A tails were not shown in the figure. Ends of exons are shown above the boxes. Numbers in “( )” underneath the boxes correspond to those of PSCA v.2. Lengths of introns and exons are not proportional.

[0069] FIG. 11. FIG. 11(a): Schematic alignment of protein variants of PSCA. Protein variants correspond to nucleotide variants. Nucleotide variants PSCA v.2, v.7 through v.18 coded the same protein as v.1. Variant v.5 coded the same protein as v.4 and protein v.3 was part of v.4. Nucleotide variants PSCA v.2, v.3, v.4 and v.5 were transcript variants of v.1, as shown in FIG. 10. The SNP in v.2 that did not cause codon change in v.2 caused a codon change in v.3, v.4, and v5. Single amino acid differences were indicated above the boxes. Black boxes represent the same sequence as PSCA v.1. Numbers underneath the box correspond to PSCA v.1. FIG. 11(b): Schematic alignment of protein variants translated from SNP variants of PSCA v.4. Protein variants correspond to nucleotide variants. Nucleotide variants PSCA v.23, v.28, v.29 and v.30 coded the same protein as v.4. SNP in v.4 that resulted in an amino acid change in v.4 and also resulted in an amino acid change in v.5 and if occurring between aa 96-189, also in v.3. Single amino acid differences were indicated above the boxes. Black boxes represent the same sequence as PSCA v.4. Numbers underneath the box correspond to PSCA v.4.

[0070] FIG. 12. FIG. 12(a): Schematic alignment of SNP variants of PSCA v.2. Variants PSCA v.6 through v.18 are variants with single nucleotide differences as compared to variant v.2. Variant v.6 changed the ORF from 56-427 to 83-427. Though these SNP variants were shown separately, they could also occur in any combinations and in any transcript variants, such as v.4 shown in FIG. 12, that contained the base pairs. Numbers correspond to those of PSCA v.2. Black box shows the same sequence as PSCA v.2. SNPs are indicated above the box. FIG. 12(b): Schematic alignment of SNP variants of PSCA v.4. Variants PSCA v.19 through v.30 are variants with single nucleotide differences as compared to variant v.4 (ORF:424-993). Though these SNP variants were shown separately, they could also occur in any combinations and in any transcript variants that contained the base pairs, such as v.5 shown in FIG. 10. Numbers correspond to those of PSCA v.4. Black box shows the same sequence as PSCA v.4. SNPs are indicated above the box.

[0071] FIG. 13. Secondary structure and transmembrane domains prediction for PSCA protein variants. FIGS. 13A, 13B, 13C, and 13D: The secondary structure of PSCA protein variant 1 (SEQ ID NO:6532), variant 3 (SEQ ID NO:6536), variant 4 (SEQ ID NO:6540), and variant 6 (SEQ ID NO:6546) (FIGS. A-D, respectively) were predicted using the HNN—Hierarchical Neural Network method (NPS@: Network Protein Sequence Analysis TIBS 2000 March Vol. 25, No 3 [291]:147-150 Combet C., Blanchet C., Geourjon C. and Deléage G., http://pbil.ibcp.fr/cgi-bin/npsa_automat.pl?page=npsa_nn.html), accessed from the ExPasy molecular biology server located on the World Wide Web at (.expasy.ch/tools/). This method predicts the presence and location of alpha helices, extended strands, and random coils from the primary protein sequence. The percent of each protein in a given secondary structure is also listed. FIGS. 13E, 13G, 13I, and 13K: Schematic representation of the probability of existence of transmembrane regions of PSCA variants 1,3,4, and 6, respectively based on the TMpred algorithm of Hofmann and Stoffel which utilizes TMBASE (K. Hofmann, W. Stoffel. TMBASE—A database of membrane spanning protein segments Biol. Chem. Hoppe-Seyler 374:166, 1993). FIGS. 13F, 13H, 13J, and 13L: Schematic representation of the probability of the existence of transmembrane regions of PSCA variant 1, based on the TMHMM algorithm of Sonnhammer, von Heijne, and Krogh (Erik L. L. Sonnhammer, Gunnar von Heijne, and Anders Krogh: A hidden Markov model for predicting transmembrane helices in protein sequences. In Proc. of Sixth Int. Conf. on Intelligent Systems for Molecular Biology, p 175-182 Ed J. Glasgow, T. Littlejohn, F. Major, R. Lathrop, D. Sankoff, and C. Sensen Menlo Park, Calif.: AAAI Press, 1998). The TMpred and TMHMM algorithms are accessed from the ExPasy molecular biology server (http://www.expasy.ch/tools/).

[0072] FIG. 14. Expression of PSCA variants. FIG. 14(A): Primers were designed to differentiate between PSCA v.1/v.2/v.4, PSCA v.3 and PSCA v.5. PSCA v.1/v.2/v.4 lead to a PCR product of 425 bp, PSCA v.3 leads to a PCR product of 300 bp, whereas PSCA v.5 leads to a PCR product of 910 bp in size. FIG. 14(B): First strand cDNA was prepared from normal bladder, brain, heart, kidney, liver, lung, prostate, spleen, skeletal muscle, testis, pancreas, colon, stomach, pools of prostate cancer, bladder cancer, kidney cancer, colon cancer, lung cancer, ovary cancer, breast cancer, cancer metastasis, and pancreas cancer. Normalization was performed by PCR using primers to actin. Semi-quantitative PCR, using the variant specific primers was performed at 30 cycles of amplification. Results show expression of PSCA v.5 mainly in breast cancer, cancer metastasis, and pancreas cancer, and at lower level in colon cancer and lung cancer. PSCA v.1/v.2/v.4 PCR product was detected in prostate cancer, bladder cancer, kidney cancer, colon cancer, lung cancer, ovary cancer, breast cancer, cancer metastasis, and pancreas cancer. Amongst normal tissues, PSCA v.1/v.2/v.4 PCR product was detected only in prostate, stomach and at lower level in kidney and lung, whereas PSCA v.5 was not detected in any normal tissue. PSCA v.3 PCR detected product was not detected in any of the samples tested.

[0073] FIG. 15. Expression of PSCA v.4 and PSCA v.5. FIG. 15(A): Primers were designed to differentiate between PSCA v.4 and PSCA v.5. PSCA v.4 lead to a PCR product of 460 bp, whereas PSCA v.5 leads to a PCR product of 945 bp in size. FIG. 15(B): First strand cDNA was prepared from normal bladder, brain, heart, kidney, liver, lung, prostate, spleen, skel. muscle, testis, pancreas, colon, stomach, pools of prostate cancer, bladder cancer, and multi-xenograft pool (prostate cancer, kidney cancer and bladder cancer xenografts). Normalization was performed by PCR using primers to actin. Semi-quantitative PCR, using the variant specific primers was performed at 30 cycles of amplification. Results show expression of PSCA v.4 in prostate cancer, bladder cancer, and multi-xenograft pool, normal kidney and prostate. PSCA v.5 was detected only in normal prostate and bladder cancer.

### MODES OF CARRYING OUT THE INVENTION

[0074] Outline of Sections

[0075] I.) Definitions

[0076] II.) PSCA Polynucleotides
[0077] II.A.) Uses of PSCA Polynucleotides
   [0078] II.A.1.) Monitoring of Genetic Abnormalities
   [0079] II.A.2.) Antisense Embodiments
   [0080] II.A.3.) Primers and Primer Pairs
   [0081] II.A.4.) Isolation of PSCA-Encoding Nucleic Acid Molecules
   [0082] II.A.5.) Recombinant Nucleic Acid Molecules and Host-Vector Systems

[0083] III.) PSCA-Related Proteins
[0084] III.A.) Motif-Bearing Protein Embodiments
[0085] III.B.) Expression of PSCA-Related Proteins
[0086] III.C.) Modifications of PSCA-Related Proteins
[0087] III.D.) Uses of PSCA-Related Proteins

[0088] IV.) PSCA Antibodies

[0089] V.) PSCA Cellular Immune Responses

[0090] VI.) PSCA Transgenic Animals

[0091] VII.) Methods for the Detection of PSCA

[0092] VIII.) Methods for Monitoring the Status of PSCA-Related Genes and Their Products

[0093] IX) Identification of Molecules that Interact with PSCA

[0094] X.) Therapeutic Methods and Compositions
[0095] X.A.) Anti-Cancer Vaccines
[0096] X.B.) PSCA as a Target for Antibody-Based Therapy
[0097] X.C.) PSCA as a Target for Cellular Immune Responses
   [0098] X.C.1. Minigene Vaccines
   [0099] X.C.2. Combinations of CTL Peptides with Helper Peptides
   [0100] X C.3. Combinations of CTL Peptides with T Cell Priming Agents
   [0101] X.C.4. Vaccine Compositions Comprising DC Pulsed with CTL and/or HTL Peptides
[0102] X.D.) Adoptive Immunotherapy
[0103] X.E.) Administration of Vaccines for Therapeutic or Prophylactic Purposes

[0104] XI.) Diagnostic and Prognostic Embodiments of PSCA.

[0105] XII.) Inhibition of PSCA Protein Function
[0106] XII.A.) Inhibition of PSCA with Intracellular Antibodies
[0107] XII.B.) Inhibition of PSCA with Recombinant Proteins
[0108] XII.C.) Inhibition of PSCA Transcription or Translation
[0109] XIl.D.) General Considerations for Therapeutic Strategies

[0110] XIII.) Identification, Characterization and Use of Modulators of PSCA

[0111] XIV.) KITS/Articles of Manufacture

[0112] I.) Definitions:

[0113] Unless otherwise defined, all terms of art, notations and other scientific terms or terminology used herein are intended to have the meanings commonly understood by those of skill in the art to which this invention pertains. In some cases, terms with commonly understood meanings are defined herein for clarity and/or for ready reference, and the inclusion of such definitions herein should not necessarily be construed to represent a substantial difference over what is generally understood in the art. Many of the techniques and procedures described or referenced herein are well understood and commonly employed using conventional methodology by those skilled in the art, such as, for example, the widely utilized molecular cloning methodologies described in Sambrook et al., Molecular Cloning: A Laboratory Manual 2nd. edition (1989) Cold Spring Harbor Laboratory Press, Cold Spring Harbor, N.Y. As appropriate, procedures involving the use of commercially available kits and reagents are generally carried out in accordance with manufacturer defined protocols and/or parameters unless otherwise noted.

[0114] The terms “advanced prostate cancer”, “locally advanced prostate cancer”, “advanced disease” and “locally advanced disease” mean prostate cancers that have extended through the prostate capsule, and are meant to include stage C disease under the American Urological Association (AUA) system, stage C1-C2 disease under the Whitmore-Jewett system, and stage T3-T4 and N+ disease under the TNM (tumor, node, metastasis) system. In general, surgery is not recommended for patients with locally advanced disease, and these patients have substantially less favorable outcomes compared to patients having clinically localized (organ-confined) prostate cancer. Locally advanced disease is clinically identified by palpable evidence of induration beyond the lateral border of the prostate, or asymmetry or induration above the prostate base. Locally advanced prostate cancer is presently diagnosed pathologically following radical prostatectomy if the tumor invades or penetrates the prostatic capsule, extends into the surgical margin, or invades the seminal vesicles.

[0115] “Altering the native glycosylation pattern” is intended for purposes herein to mean deleting one or more carbohydrate moieties found in native sequence PSCA (either by removing the underlying glycosylation site or by deleting the glycosylation by chemical and/or enzymatic means), and/or adding one or more glycosylation sites that are not present in the native sequence PSCA. In addition, the phrase includes qualitative changes in the glycosylation of the native proteins, involving a change in the nature and proportions of the various carbohydrate moieties present.

[0116] The term “analog'refers to a molecule which is structurally similar or shares similar or corresponding attributes with another molecule (e.g. a PSCA-related protein). For example, an analog of a PSCA protein can be specifically bound by an antibody or T cell that specifically binds to PSCA.

[0117] The term antibody is used in the broadest sense. Therefore, an “antibody” can be naturally occurring or man-made such as monoclonal antibodies produced by conventional hybridoma technology. Anti-PSCA antibodies comprise monoclonal and polyclonal antibodies as well as fragments containing the antigen-binding domain and/or one or more complementarity determining regions of these antibodies.

[0118] An “antibody fragment” is defined as at least a portion of the variable region of the immunoglobulin molecule that binds to its target, i.e., the antigen-binding region. In one embodiment it specifically covers single anti-PSCA antibodies and clones thereof (including agonist, antagonist and neutralizing antibodies) and anti-PSCA antibody compositions with polyepitopic specificity.

[0119] The term “codon optimized sequences” refers to nucleotide sequences that have been optimized for a particular host species by replacing any codons having a usage frequency of less than about 20%. Nucleotide sequences that have been optimized for expression in a given host species by elimination of spurious polyadenylation sequences, elimination of exon/intron splicing signals, elimination of transposon-like repeats and/or optimization of GC content in addition to codon optimization are referred to herein as an “expression enhanced sequences.”

[0120] A “combinatorial library” is a collection of diverse chemical compounds generated by either chemical synthesis or biological synthesis by combining a number of chemical “building blocks” such as reagents. For example, a linear combinatorial chemical library, such as a polypeptide (e.g., mutein) library, is formed by combining a set of chemical building blocks called amino acids in every possible way for a given compound length (i.e., the number of amino acids in a polypeptide compound). Numerous chemical compounds are synthesized through such combinatorial mixing of chemical building blocks (Gallop et al., J. Med. Chem. 37(9): 1233-1251 (1994)).

[0121] Preparation and screening of combinatorial libraries is well known to those of skill in the art. Such combinatorial chemical libraries include, but are not limited to, peptide libraries (see, e.g., U.S. Pat. No. 5,010,175, Furka, Pept. Prot. Res. 37:487-493 (1991), Houghton et al., Nature, 354:84-88 (1991)), peptoids (PCT Publication No WO 91/19735), encoded peptides (PCT Publication WO 93/20242), random bio-oligomers (PCT Publication WO 92/00091), benzodiazepines (U.S. Pat. No. 5,288,514), diversomers such as hydantoins, benzodiazepines and dipeptides (Hobbs et al., Proc. Nat. Acad. Sci. USA 90:6909-6913 (1993)), vinylogous polypeptides (Hagihara et al., J. Amer. Chem. Soc. 114:6568 (1992)), nonpeptidal peptidomimetics with a Beta-D-Glucose scaffolding (Hirschmann et al., J. Amer. Chem. Soc. 114:9217-9218 (1992)), analogous organic syntheses of small compound libraries (Chen et al., J. Amer. Chem. Soc. 116:2661 (1994)), oligocarbarnates (Cho, et al., Science 261:1303 (1993)), and/or peptidyl phosphonates (Campbell et al., J. Org. Chem. 59:658 (1994)). See, generally, Gordon et al., J. Med. Chem. 37:1385 (1994), nucleic acid libraries (see, e.g., Stratagene, Corp.), peptide nucleic acid libraries (see, e.g., U.S. Pat. No. 5,539,083), antibody libraries (see, e.g., Vaughn et al., Nature Biotechnology 14(3): 309-314 (1996), and PCT/US96/10287), carbohydrate libraries (see, e.g., Liang et al., Science 274:1520-1522 (1996), and U.S. Pat. No. 5,593,853), and small organic molecule libraries (see, e.g., benzodiazepines, Baum, C&EN, January 18, page 33 (1993); isoprenoids, U.S. Pat. No. 5,569,588; thiazolidinones and metathiazanones, U.S. Pat. No. 5,549,974; pyrrolidines, U.S. Pat. Nos. 5,525,735 and 5,519,134; morpholino compounds, U.S. Pat. No. 5,506,337; benzodiazepines, U.S. Pat. No. 5,288,514; and the like).

[0122] Devices for the preparation of combinatorial libraries are commercially available (see, e.g., 357 NIPS, 390 NIPS, Advanced Chem Tech, Louisville Ky.; Symphony, Rainin, Woburn, Mass.; 433A, Applied Biosystems, Foster City, Calif.; 9050, Plus, Millipore, Bedford, NIA). A number of well-known robotic systems have also been developed for solution phase chemistries. These systems include automated workstations such as the automated synthesis apparatus developed by Takeda Chemical Industries, LTD. (Osaka, Japan) and many robotic systems utilizing robotic arms (Zymate H, Zymark Corporation, Hopkinton, Mass.; Orca, Hewlett-Packard, Palo Alto, Calif.), which mimic the manual synthetic operations performed by a chemist. Any of the above devices are suitable for use with the present invention. The nature and implementation of modifications to these devices (if any) so that they can operate as discussed herein will be apparent to persons skilled in the relevant art. In addition, numerous combinatorial libraries are themselves commercially available (see, e.g., ComGenex, Princeton, N.J.; Asinex, Moscow, RU; Tripos, Inc., St. Louis, Mo.; ChemStar, Ltd, Moscow, RU; 3D Pharmaceuticals, Exton, Pa.; Martek Biosciences, Columbia, Md.; etc.).

[0123] The term “cytotoxic agent” refers to a substance that inhibits or prevents the expression activity of cells, function of cells and/or causes destruction of cells. The term is intended to include radioactive isotopes chemotherapeutic agents, and toxins such as small molecule toxins or enzymatically active toxins of bacterial, fungal, plant or animal origin, including fragments and/or variants thereof. Examples of cytotoxic agents include, but are not limited to auristatins, auromycins, maytansinoids, yttrium, bismuth, ricin, ricin A-chain, combrestatin, duocarmycins, dolostatins, doxorubicin, daunorubicin, taxol, cisplatin, cc1065, ethidium bromide, mitomycin, etoposide, tenoposide, vincristine, vinblastine, colchicine, dihydroxy anthracin dione, actinomycin, diphtheria toxin, Pseudomonas exotoxin (PE) A, PE40, abrin, abrin A chain, modeccin A chain, alpha-sarcin, gelonin, mitogellin, retstrictocin, phenomycin, enomycin, curicin, crotin, calicheamicin, Sapaonaria officinalis inhibitor, and glucocorticoid and other chemotherapeutic agents, as well as radioisotopes such as At²¹¹, I¹³¹, I¹²⁵, Y⁹⁰, Re¹⁸⁶, Re¹⁸⁸, Sm¹⁵³, Bi^{212 or 213}, P³² and radioactive isotopes of Lu including Lu¹⁷⁷. Antibodies may also be conjugated to an anti-cancer pro-drug activating enzyme capable of converting the pro-drug to its active form.

[0124] The “gene product” is sometimes referred to herein as a protein or mRNA. For example, a “gene product of the invention” is sometimes referred to herein as a “cancer amino acid sequence”, “cancer protein”, “protein of a cancer listed in Table I”, a “cancer mRNA”, “mRNA of a cancer listed in Table I”, etc. In one embodiment, the cancer protein is encoded by a nucleic acid of FIG. 2. The cancer protein can be a fragment, or alternatively, be the full-length protein to the fragment encoded by the nucleic acids of FIG. 2. In one embodiment, a cancer amino acid sequence is used to determine sequence identity or similarity. In another embodiment, the sequences are naturally occurring allelic variants of a protein encoded by a nucleic acid of FIG. 2. In another embodiment, the sequences are sequence variants as further described herein.

[0125] “High throughput screening” assays for the presence, absence, quantification, or other properties of particular nucleic acids or protein products are well known to those of skill in the art. Similarly, binding assays and reporter gene assays are similarly well known. Thus, e.g., U.S. Pat. No. 5,559,410 discloses high throughput screening methods for proteins; U.S. Pat. No. 5,585,639 discloses high throughput screening methods for nucleic acid binding (i.e., in arrays); while U.S. Pat. Nos. 5,576,220 and 5,541,061 disclose high throughput methods of screening for ligand/antibody binding.

[0126] In addition, high throughput screening systems are commercially available (see, e.g., Amersham Biosciences, Piscataway, N.J.; Zymark Corp., Hopkinton, Mass.; Air Technical Industries, Mentor, Ohio; Beckman Instruments, Inc. Fullerton, Calif.; Precision Systems, Inc., Natick, Mass.; etc.). These systems typically automate entire procedures, including all sample and reagent pipetting, liquid dispensing, timed incubations, and final readings of the microplate in detector(s) appropriate for the assay. These configurable systems provide high throughput and rapid start up as well as a high degree of flexibility and customization. The manufacturers of such systems provide detailed protocols for various high throughput systems. Thus, e.g., Zymark Corp. provides technical bulletins describing screening systems for detecting the modulation of gene transcription, ligand binding, and the like.

[0127] The term “homolog” refers to a molecule which exhibits homology to another molecule, by for example, having sequences of chemical residues that are the same or similar at corresponding positions.

[0128] “Human Leukocyte Antigen” or “HLA” is a human class I or class II Major Histocompatibility Complex (MHC) protein (see, e.g., Stites, et al., IMMUNOLOGY, 8^{TH} ED., Lange Publishing, Los Altos, Calif. (1994).

[0129] The terms “hybridize”, “hybridizing”, “hybridizes” and the like, used in the context of polynucleotides, are meant to refer to conventional hybridization conditions, preferably such as hybridization in 50% formamide/6×SSC/0.1% SDS/100 μg/ml ssDNA, in which temperatures for hybridization are above 37 degrees C. and temperatures for washing in 0.1×SSC/0.1% SDS are above 55 degrees C.

[0130] The phrases “isolated” or “biologically pure” refer to material which is substantially or essentially free from components which normally accompany the material as it is found in its native state. Thus, isolated peptides in accordance with the invention preferably do not contain materials normally associated with the peptides in their in situ environment. For example, a polynucleotide is said to be “isolated” when it is substantially separated from contaminant polynucleotides that correspond or are complementary to genes other than the PSCA genes or that encode polypeptides other than PSCA gene product or fragments thereof. A skilled artisan can readily employ nucleic add isolation procedures to obtain an isolated PSCA polynucleotide. A protein is said to be “isolated,” for example, when physical, mechanical or chemical methods are employed to remove the PSCA proteins from cellular constituents that are normally associated with the protein. A skilled artisan can readily employ standard purification methods to obtain an isolated PSCA protein. Alternatively, an isolated protein can be prepared by chemical means.

[0131] The term “mammal” refers to any organism classified as a mammal, including mice, rats, rabbits, dogs, cats, cows, horses and humans. In one embodiment of the invention, the mammal is a mouse. In another embodiment of the invention, the mammal is a human.

[0132] The terms “metastatic prostate cancer” and “metastatic disease” mean prostate cancers that have spread to regional lymph nodes or to distant sites, and are meant to include stage D disease under the AUA system and stage T×N×M+ under the TNM system. As is the case with locally advanced prostate cancer, surgery is generally not indicated for patients with metastatic disease, and hormonal (androgen ablation) therapy is a preferred treatment modality. Patients with metastatic prostate cancer eventually develop an androgen-refractory state within 12 to 18 months of treatment initiation. Approximately half of these androgen-refractory patients die within 6 months after developing that status. The most common site for prostate cancer metastasis is bone. Prostate cancer bone metastases are often osteoblastic rather than osteolytic (i.e., resulting in net bone formation). Bone metastases are found most frequently in the spine, followed by the femur, pelvis, rib cage, skull and humerus. Other common sites for metastasis include lymph nodes, lung, liver and brain. Metastatic prostate cancer is typically diagnosed by open or laparoscopic pelvic lymphadenectomy, whole body radionuclide scans, skeletal radiography, and/or bone lesion biopsy.

[0133] The term “modulator” or “test compound” or “drug candidate” or grammatical equivalents as used herein describe any molecule, e.g., protein, oligopeptide, small organic molecule, polysaccharide, polynucleotide, etc., to be tested for the capacity to directly or indirectly alter the cancer phenotype or the expression of a cancer sequence, e.g., a nucleic acid or protein sequences, or effects of cancer sequences (e.g., signaling, gene expression, protein interaction, etc.) In one aspect, a modulator will neutralize the effect of a cancer protein of the invention. By “neutralize” is meant that an activity of a protein is inhibited or blocked, along with the consequent effect on the cell. In another aspect, a modulator will neutralize the effect of a gene, and its corresponding protein, of the invention by normalizing levels of said protein. In preferred embodiments, modulators alter expression profiles, or expression profile nucleic acids or proteins provided herein, or downstream effector pathways. In one embodiment, the modulator suppresses a cancer phenotype, e.g. to a normal tissue fingerprint. In another embodiment, a modulator induced a cancer phenotype. Generally, a plurality of assay mixtures is run in parallel with different agent concentrations to obtain a differential response to the various concentrations. Typically, one of these concentrations serves as a negative control, i.e., at zero concentration or below the level of detection.

[0134] Modulators, drug candidates or test compounds encompass numerous chemical classes, though typically they are organic molecules, preferably small organic compounds having a molecular weight of more than 100 and less than about 2,500 Daltons. Preferred small molecules are less than 2000, or less than 1500 or less than 1000 or less than 500 D. Candidate agents comprise functional groups necessary for structural interaction with proteins, particularly hydrogen bonding, and typically include at least an amine, carbonyl, hydroxyl or carboxyl group, preferably at least two of the functional chemical groups. The candidate agents often comprise cyclical carbon or heterocyclic structures and/or aromatic or polyaromatic structures substituted with one or more of the above functional groups. Modulators also comprise biomolecules such as peptides, saccharides, fatty acids, steroids, purines, pyrimidines, derivatives, structural analogs or combinations thereof. Particularly preferred are peptides. One class of modulators are peptides, for example of from about five to about 35 amino acids, with from about five to about 20 amino acids being preferred, and from about 7 to about 15 being particularly preferred. Preferably, the cancer modulatory protein is soluble, includes a non-transmembrane region, and/or, has an N-terminal Cys to aid in solubility. In one embodiment, the C-terminus of the fragment is kept as a free acid and the N-terminus is a free amine to aid in coupling, i.e., to cysteine. In one embodiment, a cancer protein of the invention is conjugated to an immunogenic agent as discussed herein. In one embodiment, the cancer protein is conjugated to BSA. The peptides of the invention, e.g., of preferred lengths, can be linked to each other or to other amino acids to create a longer peptide/protein. The modulatory peptides can be digests of naturally occurring proteins as is outlined above, random peptides, or “biased” random peptides. In a preferred embodiment, peptide/protein-based modulators are antibodies, and fragments thereof, as defined herein.

[0135] Modulators of cancer can also be nucleic acids. Nucleic acid modulating agents can be naturally occurring nucleic acids, random nucleic acids, or “biased” random nucleic acids. For example, digests of prokaryotic or eukaryotic genomes can be used in an approach analogous to that outlined above for proteins.

[0136] The term “monoclonal antibody” refers to an antibody obtained from a population of substantially homogeneous antibodies, i.e., the antibodies comprising the population are identical except for possible naturally occurring mutations that are present in minor amounts.

[0137] A “motif”, as in biological motif of a PSCA-related protein, refers to any pattern of amino acids forming part of the primary sequence of a protein, that is associated with a particular function (e.g. protein-protein interaction, protein-DNA interaction, etc) or modification (e.g. that is phosphorylated, glycosylated or amidated), or localization (e.g. secretory sequence, nuclear localization sequence, etc.) or a sequence that is correlated with being immunogenic, either humorally or cellularly. A motif can be either contiguous or capable of being aligned to certain positions that are generally correlated with a certain function or property. In the context of HLA motifs, “motif” refers to the pattern of residues in a peptide of defined length, usually a peptide of from about 8 to about 13 amino acids for a class I HLA motif and from about 6 to about 25 amino acids for a class II HLA motif, which is recognized by a particular HLA molecule. Peptide motifs for HLA binding are typically different for each protein encoded by each human HLA allele and differ in the pattern of the primary and secondary anchor residues.

[0138] A “pharmaceutical excipient” comprises a material such as an adjuvant, a carrier, pH-adjusting and buffering agents, tonicity adjusting agents, wetting agents, preservative, and the like.

[0139] “Pharmaceutically acceptable” refers to a non-toxic, inert, and/or composition that is physiologically compatible with humans or other mammals.

[0140] The term “polynucleotide” means a polymeric form of nucleotides of at least 10 bases or base pairs in length, either ribonucleotides or deoxynucleotides or a modified form of either type of nucleotide, and is meant to include single and double stranded forms of DNA and/or RNA. In the art, this term if often used interchangeably with “oligonucleotide”. A polynucleotide can comprise a nucleotide sequence disclosed herein wherein thymidine (T), as shown for example in FIG. 2, can also be uracil (U); this definition pertains to the differences between the chemical structures of DNA and RNA, in particular the observation that one of the four major bases in RNA is uracil (U) instead of thymidine (T).

[0141] The term “polypeptide” means a polymer of at least about 4, 5, 6, 7, or 8 amino acids. Throughout the specification, standard three letter or single letter designations for amino acids are used. In the art, this term is often used interchangeably with “peptide” or “protein”.

[0142] An HLA “primary anchor residue” is an amino acid at a specific position along a peptide sequence which is understood to provide a contact point between the immunogenic peptide and the HLA molecule. One to three, usually two, primary anchor residues within a peptide of defined length generally defines a “motif” for an immunogenic peptide. These residues are understood to fit in close contact with peptide binding groove of an HLA molecule, with their side chains buried in specific pockets of the binding groove. In one embodiment, for example, the primary anchor residues for an HLA class I molecule are located at position 2 (from the amino terminal position) and at the carboxyl terminal position of a 8, 9, 10, 11, or 12 residue peptide epitope in accordance with the invention. Alternatively, in another embodiment, the primary anchor residues of a peptide binds an HLA class II molecule are spaced relative to each other, rather than to the termini of a peptide, where the peptide is generally of at least 9 amino acids in length. The primary anchor positions for each motif and supermotif are set forth in Table IV. For example, analog peptides can be created by altering the presence or absence of particular residues in the primary and/or secondary anchor positions shown in Table IV. Such analogs are used to modulate the binding affinity and/or population coverage of a peptide comprising a particular HLA motif or supermotif.

[0143] “Radioisotopes” include, but are not limited to the following (non-limiting exemplary uses are also set forth):

[0144] **Examples of Medical Isotopes:

| Isotope | Description of use |
|---|---|
| Actinium-225 | See Thorium-229 (Th-229) |
| (AC-225) | |
| Actinium-227 | Parent of Radium-223 (Ra-223) which is an alpha emitter used to treat metastases in the skeleton |
| (AC-227) | resulting from cancer (i.e., breast and prostate cancers), and cancer radioimmunotherapy |
| Bismuth-212 | See Thorium-228 (Th-228) |
| (Bi-212) | |
| Bismuth-213 | See Thorium-229 (Th-229) |
| (Bi-213) | |
| Cadmium-109 | Cancer detection |
| (Cd-109) | |
| Cobalt-60 | Radiation source for radiotherapy of cancer, for food irradiators, and for sterilization of medical |
| (Co-60) | supplies |
| Copper-64 | A positron emitter used for cancer therapy and SPECT imaging |
| (Cu-64) | |
| Copper-67 | Beta/gamma emitter used in cancer radioimmunotherapy and diagnostic studies (i.e., breast and |
| (Cu-67) | colon cancers, and lymphoma) |
| Dysprosium-166 | Cancer radioimmunotherapy |
| (Dy-166) | |
| Erbium-169 | Rheumatoid arthritis treatment, particularly for the small joints associated with fingers and toes |
| (Er-169) | |
| Europium-152 | Radiation source for food irradiation and for sterilization of medical supplies |
| (Eu-152) | |
| Europium-154 | Radiation source for food irradiation and for sterilization of medical supplies |
| (Eu-154) | |
| Gadolinium-153 | Osteoporosis detection and nuclear medical quality assurance devices |
| (Gd-153) | |
| Gold-198 | Implant and intracavity therapy of ovarian, prostate, and brain cancers |
| (Au-198) | |
| Holmium-166 | Multiple myeloma treatment in targeted skeletal therapy, cancer radioimmunotherapy, bone |
| (Ho-166) | marrow ablation, and rheumatoid arthritis treatment |
| Iodine-125 | Osteoporosis detection, diagnostic imaging, tracer drugs, brain cancer treatment, radiolabeling, |
| (I-125) | tumor imaging, mapping of receptors in the brain, interstitial radiation therapy, brachytherapy for |
| | treatment of prostate cancer, determination of glomerular filtration rate (GFR), determination of |
| | plasma volume, detection of deep vein thrombosis of the legs |
| Iodine-131 | Thyroid function evaluation, thyroid disease detection, treatment of thyroid cancer as well as other |
| (I-131) | non-malignant thyroid diseases (i.e., Graves disease, goiters, and hyperthyroidism), treatment of |
| | leukemia, lymphoma, and other forms of cancer (e.g., breast cancer) using radioimmunotherapy |
| Iridium-192 | Brachytherapy, brain and spinal cord tumor treatment, treatment of blocked arteries (i.e., |
| (Ir-192) | arteriosclerosis and restenosis), and implants for breast and prostate tumors |
| Lutetium-177 | Cancer radioimmunotherapy and treatment of blocked arteries (i.e., arteriosclerosis and |
| (Lu-177) | restenosis) |
| Molybdenum-99 | Parent of Technetium-99m (Tc-99m) which is used for imaging the brain, liver, lungs, heart, and |
| (Mo-99) | other organs. Currently, Tc-99m is the most widely used radioisotope used for diagnostic imaging |
| | of various cancers and diseases involving the brain, heart, liver, lungs; also used in detection of |
| | deep vein thrombosis of the legs |
| Osmium-194 | Cancer radioimmunotherapy |
| (Os-194) | |
| Palladium-103 | Prostate cancer treatment |
| (Pd-103) | |
| Platinum-195m | Studies on biodistribution and metabolism of cisplatin, a chemotherapeutic drug |
| (Pt-195m) | |
| Phosphorus-32 | Polycythemia rubra vera (blood cell disease) and leukemia treatment, bone cancer |
| (P-32) | diagnosis/treatment; colon, pancreatic, and liver cancer treatment; radiolabeling nucleic acids for |
| | in vitro research, diagnosis of superficial tumors, treatment of blocked arteries (i.e., |
| | arteriosclerosis and restenosis), and intracavity therapy |
| Phosphorus-33 | Leukemia treatment, bone disease diagnosis/treatment, radiolabeling, and treatment of blocked |
| (P-33) | arteries (i.e., arteriosclerosis and restenosis) |
| Radium-223 | See Actinium-227 (Ac-227) |
| (Ra-223) | |
| Rhenium-186 | Bone cancer pain relief, rheumatoid arthritis treatment, and diagnosis and treatment of lymphoma |
| (Re-186) | and bone, breast, colon, and liver cancers using radioimmunotherapy |
| Rhenium-188 | Cancer diagnosis and treatment using radioimmunotherapy, bone cancer pain relief, treatment of |
| (Re-188) | rheumatoid arthritis, and treatment of prostate cancer |
| Rhodium-105 | Cancer radioimmunotherapy |
| (Rh-105) | |
| Samarium-145 | Ocular cancer treatment |
| (Sm-145) | |
| Samarium-153 | Cancer radioimmunotherapy and bone cancer pain relief |
| (Sm-153) | |
| Scandium-47 | Cancer radioimmunotherapy and bone cancer pain relief |
| (Sc-47) | |
| Selenium-75 | Radiotracer used in brain studies, imaging of adrenal cortex by gamma-scintigraphy, lateral |
| (Se-75) | locations of steroid secreting tumors, pancreatic scanning, detection of hyperactive parathyroid |
| | glands, measure rate of bile acid loss from the endogenous pool |
| Strontium-85 | Bone cancer detection and brain scans |
| (Sr-85) | |
| Strontium-89 | Bone cancer pain relief, multiple myeloma treatment, and osteoblastic therapy |
| (Sr-89) | |
| Technetium-99m | See Molybdenum-99 (Mo-99) |
| (Tc-99m) | |
| Thorium-228 | Parent of Bismuth-212 (Bi-212) which is an alpha emitter used in cancer radioimmunotherapy |
| (Th-228) | |
| Thorium-229 | Parent of Actinium-225 (Ac-225) and grandparent of Bismuth-213 (Bi-213) which are alpha |
| (Th-229) | emitters used in cancer radioimmunotherapy |
| Thulium-170 | Gamma source for blood irradiators, energy source for implanted medical devices |
| (Tm-170) | |
| Tin-117m | Cancer immunotherapy and bone cancer pain relief |
| (Sn-117m) | |
| Tungsten-188 | Parent for Rhenium-188 (Re-188) which is used for cancer diagnostics/treatment, bone cancer |
| (W-188) | pain relief, rheumatoid arthritis treatment, and treatment of blocked arteries (i.e., arteriosclerosis |
| | and restenosis) |
| Xenon-127 | Neuroimaging of brain disorders, high resolution SPECT studies, pulmonary function tests, and |
| (Xe-127) | cerebral blood flow studies |
| Ytterbium-175 | Cancer radioimmunotherapy |
| (Yb-175) | |
| Yttrium-90 | Microseeds obtained from irradiating Yttrium-89 (Y-89) for liver cancer treatment |
| (Y-90) | |
| Yttrium-91 | A gamma-emitting label for Yttrium-90 (Y-90) which is used for cancer radioimmunotherapy (i.e., |
| (Y-91) | lymphoma, breast, colon, kidney, lung, ovarian, prostate, pancreatic, and inoperable liver cancers) |

[0145] By “randomized” or grammatical equivalents as herein applied to nucleic acids and proteins is meant that each nucleic acid and peptide consists of essentially random nucleotides and amino acids, respectively. These random peptides (or nucleic acids, discussed herein) can incorporate any nucleotide or amino acid at any position. The synthetic process can be designed to generate randomized proteins or nucleic acids, to allow the formation of all or most of the possible combinations over the length of the sequence, thus forming a library of randomized candidate bioactive proteinaceous agents.

[0146] In one embodiment, a library is “fully randomized,” with no sequence preferences or constants at any position. In another embodiment, the library is a “biased random” library. That is, some positions within the sequence either are held constant, or are selected from a limited number of possibilities. For example, the nucleotides or amino acid residues are randomized within a defined class, e.g., of hydrophobic amino acids, hydrophilic residues, sterically biased (either small or large) residues, towards the creation of nucleic acid binding domains, the creation of cysteines, for cross-linking, prolines for SH-3 domains, serines, threonines, tyrosines or histidines for phosphorylation sites, etc., or to purines, etc.

[0147] A “recombinant” DNA or RNA molecule is a DNA or RNA molecule that has been subjected to molecular manipulation in vitro.

[0148] Non-limiting examples of small molecules include compounds that bind or interact with PSCA, ligands including hormones, neuropeptides, chemokines, odorants, phospholipids, and functional equivalents thereof that bind and preferably inhibit PSCA protein function. Such non-limiting small molecules preferably have a molecular weight of less than about 10 kDa, more preferably below about 9, about 8, about 7, about 6, about 5 or about 4 kDa. In certain embodiments, small molecules physically associate with, or bind, PSCA protein; are not found in naturally occurring metabolic pathways; and/or are more soluble in aqueous than non-aqueous solutions

[0149] “Stringency” of hybridization reactions is readily determinable by one of ordinary skill in the art, and generally is an empirical calculation dependent upon probe length, washing temperature, and salt concentration. In general, longer probes require higher temperatures for proper annealing, while shorter probes need lower temperatures. Hybridization generally depends on the ability of denatured nucleic acid sequences to reanneal when complementary strands are present in an environment below their melting temperature. The higher the degree of desired homology between the probe and hybridizable sequence, the higher the relative temperature that can be used. As a result, it follows that higher relative temperatures would tend to make the reaction conditions more stringent, while lower temperatures less so. For additional details and explanation of stringency of hybridization reactions, see Ausubel et al., Current Protocols in Molecular Biology, Wiley Interscience Publishers, (1995).

[0150] “Stringent conditions” or “high stringency conditions”, as defined herein, are identified by, but not limited to, those that: (1) employ low ionic strength and high temperature for washing, for example 0.015 M sodium chloride/0.0015 M sodium citrate/0.1% sodium dodecyl sulfate at 50° C.; (2) employ during hybridization a denaturing agent, such as formamide, for example, 50% (v/v) formamide with 0.1% bovine serum albumin/0.1% Ficoll/0.1% polyvinylpyrrolidone/50 mM sodium phosphate buffer at pH 6.5 with 750 mM sodium chloride, 75 mM sodium citrate at 42° C.; or (3) employ 50% formamide, 5×SSC (0.75 M NaCl, 0.075 M sodium citrate), 50 mM sodium phosphate (pH 6.8), 0.1% sodium pyrophosphate, 5×Denhardt's solution, sonicated salmon sperm DNA (50 μg/ml), 0.1% SDS, and 10% dextran sulfate at 42° C., with washes at 42° C. in 0.2×SSC (sodium chloride/sodium. citrate) and 50% formamide at 55° C., followed by a high-stringency wash consisting of 0.1×SSC containing EDTA at 55° C. “Moderately stringent conditions” are described by, but not limited to, those in Sambrook et al., Molecular Cloning: A Laboratory Manual, New York: Cold Spring Harbor Press, 1989, and include the use of washing solution and hybridization conditions (e.g., temperature, ionic strength and % SDS) less stringent than those described above. An example of moderately stringent conditions is overnight incubation at 37° C. in a solution comprising: 20% formamide, 5×SSC (150 mM NaCl, 15 mM trisodium citrate), 50 mM sodium phosphate (pH 7.6), 5×Denhardt's solution, 10% dextran sulfate, and 20 mg/mL denatured sheared salmon sperm DNA, followed by washing the filters in 1×SSC at about 37-50° C. The skilled artisan will recognize how to adjust the temperature, ionic strength, etc. as necessary to accommodate factors such as probe length and the like.

[0151] An HLA “supermotif” is a peptide binding specificity shared by HLA molecules encoded by two or more HLA alleles. Overall phenotypic frequencies of HLA-supertypes in different ethnic populations are set forth in Table IV (F). The non-limiting constituents of various supetypes are as follows:

[0152] A2: A*0201, A*0202, A*0203, A*0204, A*0205, A*0206, A*6802, A*6901, A*0207

[0153] A3: A3, A11, A31, A*3301, A*6801, A*0301, A*1101, A*3101

[0154] B7: B7, B*3501-03, B*51, B*5301, B*5401, B*5501, B*5502, B*5601, B*6701, B*7801, B*0702, B*5101, B*5602

[0155] B44: B*3701, B*4402, B*4403, B*60 (B*4001), B61 (B*4006)

[0156] A1: A*0102, A*2604, A*3601, A*4301, A*8001

[0157] A24: A*24, A*30, A*2403, A*2404, A*3002, A*3003

[0158] B27: B*1401-02, B*1503, B*1509, B*1510, B*1518, B*3801-02, B*3901, B*3902, B*3903-04, B*4801-02, B*7301, B*2701-08

[0159] B58: B*1516, B*1517, B*5701, B*5702, B58

[0160] B62: B*4601, B52, B*1501 (B62), B*1502 (B75), B*1513 (B77)

[0161] Calculated population coverage afforded by different HLA-supertype combinations are set forth in Table IV (G).

[0162] As used herein “to treat” or “therapeutic” and grammatically related terms, refer to any improvement of any consequence of disease, such as prolonged survival, less morbidity, and/or a lessening of side effects which are the byproducts of an alternative therapeutic modality; full eradication of disease is not required.

[0163] A “transgenic animal” (e.g., a mouse or rat) is an animal having cells that contain a transgene, which transgene was introduced into the animal or an ancestor of the animal at a prenatal, e.g., an embryonic stage. A “transgene” is a DNA that is integrated into the genome of a cell from which a transgenic animal develops.

[0164] As used herein, an HLA or cellular immune response “vaccine” is a composition that contains or encodes one or more peptides of the invention. There are numerous embodiments of such vaccines, such as a cocktail of one or more individual peptides; one or more peptides of the invention comprised by a polyepitopic peptide; or nucleic acids that encode such individual peptides or polypeptides, e.g., a minigene that encodes a polyepitopic peptide. The “one or more peptides” can include any whole unit integer from 1-150or more, e.g., at least 2, 3, 4, 5, 6, 7, 8, 9, 10, 11, 12, 13, 14, 15, 16, 17, 18, 19, 20, 21, 22, 23, 24, 25, 26, 27, 28, 29, 30, 31, 32, 33, 34, 35, 36, 37, 38, 39, 40, 41, 42, 43, 44, 45, 46, 47, 48, 49, 50, 55, 60, 65, 70, 75, 80, 85, 90, 95, 100, 105, 110, 115, 120, 125, 130, 135, 140, 145, or 150 or more peptides of the invention. The peptides or polypeptides can optionally be modified, such as by lipidation, addition of targeting or other sequences. HLA class I peptides of the invention can be admixed with, or linked to, HLA class 11 peptides, to facilitate activation of both cytotoxic T lymphocytes and helper T lymphocytes. HLA vaccines can also comprise peptide-pulsed antigen presenting cells, e.g., dendritic cells.

[0165] The term “variant” refers to a molecule that exhibits a variation from a described type or norm, such as a protein that has one or more different amino acid residues in the corresponding position(s) of a specifically described protein (e.g. the PSCA protein shown in FIG. 2 or FIG. 3. An analog is an example of a variant protein. Splice isoforms and single nucleotides polymorphisms (SNPs) are further examples of variants.

[0166] The “PSCA-related proteins” of the invention include those specifically identified herein, as well as allelic variants, conservative substitution variants, analogs and homologs that can be isolated/generated and characterized without undue experimentation following the methods outlined herein or readily available in the art. Fusion proteins that combine parts of different PSCA proteins or fragments thereof, as well as fusion proteins of a PSCA protein and a heterologous polypeptide are also included. Such PSCA proteins are collectively referred to as the PSCA-related proteins, the proteins of the invention, or PSCA. The term “PSCA-related protein” refers to a polypeptide fragment or a PSCA protein sequence of 4, 5, 6, 7, 8, 9, 10, 11, 12, 13, 14, 15, 16, 17, 18, 19, 20, 21, 22, 23, 24, 25, or more than 25 amino acids; or, at least 30, 35, 40, 45, 50, 55, 60, 65, 70, 80, 85, 90, 95, 100, 105, 110, 115, 120, 125, 130, 135, 140, 145, 150, 155, 160, 165, 170, 175, 180, 185, 190, 195, 200, 225, 250, 275, 300, 325, 350, 375, 400, 425, 450, 475, 500, 525, 550, 575, or 576 or more amino acids.

[0167] II.) PSCA Polynucleotides

[0168] One aspect of the invention provides polynucleotides corresponding or complementary to all or part of a PSCA gene, mRNA, and/or coding sequence, preferably in isolated form, including polynucleotides encoding a PSCA-related protein and fragments thereof, DNA, RNA, DNA/RNA hybrid, and related molecules, polynucleotides or oligonucleotides complementary to a PSCA gene or mRNA sequence or a part thereof, and polynucleotides or oligonucleotides that hybridize to a PSCA gene, mRNA, or to a PSCA encoding polynucleotide (collectively, “PSCA polynucleotides”). In all instances when referred to in this section, T can also be U in FIG. 2.

[0169] Embodiments of a PSCA polynucleotide include: a PSCA polynucleotide having the sequence shown in FIG. 2, the nucleotide sequence of PSCA as shown in FIG. 2 wherein T is U; at least 10 contiguous nucleotides of a polynucleotide having the sequence as shown in FIG. 2; or, at least 10 contiguous nucleotides of a polynucleotide having the sequence as shown in FIG. 2 where T is U. For example, embodiments of PSCA nucleotides comprise, without limitation:

[0170] (I) a polynucleotide comprising, consisting essentially of, or consisting of a sequence as shown in FIG. 2, wherein T can also be U;

[0171] (II) a polynucleotide comprising, consisting essentially of, or consisting of the sequence as shown in FIG. 2A, from nucleotide residue number 18 through nucleotide residue number 389, including the stop codon, wherein T can also be U;

[0172] (III) a polynucleotide comprising, consisting essentially of, or consisting of the sequence as shown in FIG. 2B, from nucleotide residue number 56 through nucleotide residue number 427, including the stop codon, wherein T can also be U;

[0173] (IV) a polynucleotide comprising, consisting essentially of, or consisting of the sequence as shown in FIG. 2C, from nucleotide residue number 423 through nucleotide residue number 707, including the a stop codon, wherein T can also be U;

[0174] (V) a polynucleotide comprising, consisting essentially of, or consisting of the sequence as shown in FIG. 2D, from nucleotide residue number 424 through nucleotide residue number 993, including the stop codon, wherein T can also be U;

[0175] (VI) a polynucleotide comprising, consisting essentially of, or consisting of the sequence as shown in FIG. 2E, from nucleotide residue number 910 through nucleotide residue number 1479, including the stop codon, wherein T can also be U;

[0176] (VII) a polynucleotide comprising, consisting essentially of, or consisting of the sequence as shown in FIG. 2F, from nucleotide residue number 83 through nucleotide residue number 427, including the stop codon, wherein T can also be U;

[0177] (VIII) a polynucleotide comprising, consisting essentially of, or consisting of the sequence as shown in FIG. 2G, from nucleotide residue number 56 through nucleotide residue number 427, including the stop codon, wherein T can also be U;

[0178] (IX) a polynucleotide comprising, consisting essentially of, or consisting of the sequence as shown in FIG. 2H, from nucleotide residue number 424 through nucleotide residue number 993, including the stop codon, wherein T can also be U;

[0179] (X) a polynucleotide that encodes a PSCA-related protein that is at least 90, 91, 92, 93, 94, 95, 96, 97, 98, 99 or 100% homologous to an entire amino acid sequence shown in FIG. 2A-H;

[0180] (XI) a polynucleotide that encodes a PSCA-related protein that is at least 90, 91, 92, 93, 94, 95, 96, 97, 98, 99 or 100% identical to an entire amino acid sequence shown in FIG. 2A-H;

[0181] (XII) polynucleotide that encodes at least one peptide set forth in Tables VIII-XXI and XXII-XLIX;

[0182] (XIII) a polynucleotide that encodes a peptide region of at least 5, 6, 7, 8, 9, 10, 11, 12, 13, 14, 15, 16, 17, 18, 19, 20, 21, 22, 23, 24, 25, 26, 27, 28, 29, 30, 31, 32, 33, 34, 35 amino acids of a peptide of FIGS. 3A in any whole number increment up to 123 that includes at least 1, 2, 3, 4, 5, 6, 7, 8, 9, 10, 11, 12, 13, 14, 15, 16, 17, 18, 19, 20, 21, 22, 23, 24, 25, 26, 27, 28, 29, 30, 31, 32, 33, 34, 35 amino acid position(s) having a value greater than 0.5 in the Hydrophilicity profile of FIG. 5;

[0183] (XIV) a polynucleotide that encodes a peptide region of at least 5, 6, 7, 8, 9, 10, 11, 12, 13, 14, 15, 16, 17, 18, 19, 20, 21, 22, 23, 24, 25, 26, 27, 28, 29, 30, 31, 32, 33, 34, 35 amino acids of a peptide of FIG. 3A in any whole number increment up to 123 that includes 1, 2, 3, 4, 5, 6, 7, 8, 9, 10, 11, 12, 13, 14, 15, 16, 17, 18, 19, 20, 21, 22, 23, 24, 25, 26, 27, 28, 29, 30, 31, 32, 33, 34, 35 amino acid position(s) having a value less than 0.5 in the Hydropathicity profile of FIG. 6;

[0184] (XV) a polynucleotide that encodes a peptide region of at least 5, 6, 7, 8, 9, 10, 11, 12, 13, 14, 15, 16, 17, 18, 19, 20, 21, 22, 23, 24, 25, 26, 27, 28, 29, 30, 31, 32, 33, 34, 35 amino acids of a peptide of FIG. 3A in any whole number increment up to 123 that includes 1, 2, 3, 4, 5, 6, 7, 8, 9, 10, 11, 12, 13, 14, 15, 16, 17, 18, 19, 20, 21, 22, 23, 24, 25, 26, 27, 28, 29, 30, 31, 32, 33, 34, 35 amino acid position(s) having a value greater than 0.5 in the Percent Accessible Residues profile of FIG. 7;

[0185] (XVI) a polynucleotide that encodes a peptide region of at least 5, 6, 7, 8, 9, 10, 11, 12, 13, 14, 15, 16, 17, 18, 19, 20, 21, 22, 23, 24, 25, 26, 27, 28, 29, 30, 31, 32, 33, 34, 35 amino acids of a peptide of FIG. 3A in any whole number increment up to 123 that includes 1, 2, 3, 4, 5, 6, 7, 8, 9, 10, 11, 12, 13, 14, 15, 16, 17, 18, 19, 20, 21, 22, 23, 24, 25, 26, 27, 28, 29, 30, 31, 32, 33, 34, 35 amino acid position(s) having a value greater than 0.5 in the Average Flexibility profile of FIG. 8;

[0186] (XVII) a polynucleotide that encodes a peptide region of at least 5, 6, 7, 8, 9, 10, 11, 12, 13, 14, 15, 16, 17, 18, 19, 20, 21, 22, 23, 24, 25, 26, 27, 28, 29, 30, 31, 32, 33, 34, 35 amino acids of a peptide of FIG. 3A in any whole number increment up to 123 that includes 1, 2, 3, 4, 5, 6, 7, 8, 9, 10, 11, 12, 13, 14, 15, 16, 17, 18, 19, 20, 21, 22, 23, 24, 25, 26, 27, 28, 29, 30, 31, 32, 33, 34, 35 amino acid position(s) having a value greater than 0.5 in the Beta-turn profile of FIG. 9;

[0187] (XVIII) a polynucleotide that encodes a peptide region of at least 5, 6, 7, 8, 9, 10, 11, 12, 13, 14, 15, 16, 17, 18, 19, 20, 21, 22, 23, 24, 25, 26, 27, 28, 29, 30, 31, 32, 33, 34, 35 amino acids of a peptide of FIG. 3B in any whole number increment up to 94 that includes 1, 2, 3, 4, 5, 6, 7, 8, 9, 10, 11, 12, 13, 14, 15, 16, 17, 18, 19, 20, 21, 22, 23, 24, 25, 26, 27, 28, 29, 30, 31, 32, 33, 34, 35 amino acid position(s) having a value greater than 0.5 in the Hydrophilicity profile of FIG. 5;

[0188] (XIX) a polynucleotide that encodes a peptide region of at least 5, 6, 7, 8, 9, 10, 11, 12, 13, 14, 15, 16, 17, 18, 19, 20, 21, 22, 23, 24, 25, 26, 27, 28, 29, 30, 31, 32, 33, 34, 35 amino acids of a peptide of FIG. 3B in any whole number increment up to 94 that includes 1, 2, 3, 4, 5, 6, 7, 8, 9, 10, 11, 12, 13, 14, 15, 16, 17, 18, 19, 20, 21, 22, 23, 24, 25, 26, 27, 28, 29, 30, 31, 32, 33, 34, 35 amino acid position(s) having a value less than 0.5 in the Hydropathicity profile of FIG. 6;

[0189] (XX) a polynucleotide that encodes a peptide region of at least 5, 6, 7, 8, 9, 10, 11, 12, 13, 14, 15, 16, 17, 18, 19, 20, 21, 22, 23, 24, 25, 26, 27, 28, 29, 30, 31, 32, 33, 34, 35 amino acids of a peptide of FIG. 3B in any whole number increment up to 94 that includes 1, 2, 3, 4, 5, 6, 7, 8, 9, 10, 11, 12, 13, 14, 15, 16, 17, 18, 19, 20, 21, 22, 23, 24, 25, 26, 27, 28, 29, 30, 31, 32, 33, 34, 35 amino acid position(s) having a value greater than 0.5 in the Percent Accessible Residues profile of FIG. 7;

[0190] (XXI) a polynucleotide that encodes a peptide region of at least 5, 6, 7, 8, 9, 10, 11, 12, 13, 14, 15, 16, 17, 18, 19, 20, 21, 22, 23, 24, 25, 26, 27, 28, 29, 30, 31, 32, 33, 34, 35 amino acids of a peptide of FIG. 3B in any whole number increment up to 94 that includes 1, 2, 3, 4, 5, 6, 7, 8, 9, 10, 11, 12, 13, 14, 15, 16, 17, 18, 19, 20, 21, 22, 23, 24, 25, 26, 27, 28, 29, 30, 31, 32, 33, 34, 35 amino acid position(s) having a value greater than 0.5 in the Average Flexibility profile of FIG. 8;

[0191] (XXII) a polynucleotide that encodes a peptide region of at least 5, 6, 7, 8, 9, 10, 11, 12, 13, 14, 15, 16, 17, 18, 19, 20, 21, 22, 23, 24, 25, 26, 27, 28, 29, 30, 31, 32, 33, 34, 35 amino acids of a peptide of FIG. 3B in any whole number increment up to 94 that includes 1, 2, 3, 4, 5, 6, 7, 8, 9, 10, 11, 12, 13, 14, 15, 16, 17, 18, 19, 20, 21, 22, 23, 24, 25, 26, 27, 28, 29, 30, 31, 32, 33, 34, 35 amino acid position(s) having a value greater than 0.5 in the Beta-turn profile of FIG. 9;

[0192] (XXIII) a polynucleotide that encodes a peptide region of at least 5, 6, 7, 8, 9, 10, 11, 12, 13, 14, 15, 16, 17, 18, 19, 20, 21, 22, 23, 24, 25, 26, 27, 28, 29, 30, 31, 32, 33, 34, 35 amino acids of a peptide of FIGS. 3C, 3E-3L in any whole number increment up to 189 that includes 1, 2, 3, 4, 5, 6, 7, 8, 9, 10, 11, 12, 13, 14, 15, 16, 17, 18, 19, 20, 21, 22, 23, 24, 25, 26, 27, 28, 29, 30, 31, 32, 33, 34, 35 amino acid position(s) having a value greater than 0.5 in the Hydrophilicity profile of FIG. 5

[0193] (XXIV) a polynucleotide that encodes a peptide region of at least 5, 6, 7, 8, 9, 10, 11, 12, 13, 14, 15, 16, 17, 18, 19, 20, 21, 22, 23, 24, 25, 26, 27, 28, 29, 30, 31, 32, 33, 34, 35 amino acids of a peptide of FIGS. 3C, 3E-3L in any whole number increment up to 189 that includes 1, 2, 3, 4, 5, 6, 7, 8, 9, 10, 11, 12, 13, 14, 15, 16, 17, 18, 19, 20, 21, 22, 23, 24, 25, 26, 27, 28, 29, 30, 31, 32, 33, 34, 35 amino acid position(s) having a value less than 0.5 in the Hydropathicity profile of FIG. 6;

[0194] (XXV) a polynucleotide that encodes a peptide region of at least 5, 6, 7, 8, 9, 10, 11, 12, 13, 14, 15, 16, 17, 18, 19, 20, 21, 22, 23, 24, 25, 26, 27, 28, 29, 30, 31, 32, 33, 34, 35 amino acids of a peptide of FIGS. 3C, 3E-3L in any whole number increment up to 189 that includes 1, 2, 3, 4, 5, 6, 7, 8, 9, 10, 11, 12, 13, 14, 15, 16, 17, 18, 19, 20, 21, 22, 23, 24, 25, 26, 27, 28, 29, 30, 31, 32, 33, 34, 35 amino acid position(s) having a value greater than 0.5 in the Percent Accessible Residues profile of FIG. 7;

[0195] (XXVI) a polynucleotide that encodes a peptide region of at least 5, 6, 7, 8, 9, 10, 11, 12, 13, 14, 15, 16, 17, 18, 19, 20, 21, 22, 23, 24, 25, 26, 27, 28, 29, 30, 31, 32, 33, 34, 35 amino acids of a peptide of FIGS. 3C, 3E-3L in any whole number increment up to 189 that includes 1, 2, 3, 4, 5, 6, 7, 8, 9, 10, 11, 12, 13, 14, 15, 16, 17, 18, 19, 20, 21, 22, 23, 24, 25, 26, 27, 28, 29, 30, 31, 32, 33, 34, 35 amino acid position(s) having a value greater than 0.5 in the Average Flexibility profile of FIG. 8;

[0196] (XXVII) a polynucleotide that encodes a peptide region of at least 5, 6, 7, 8, 9, 10, 11, 12, 13, 14, 15, 16, 17, 18, 19, 20, 21, 22, 23, 24, 25, 26, 27, 28, 29, 30, 31, 32, 33, 34, 35 amino acids of a peptide of FIGS. 3C, 3E-3L in any whole number increment up to 189 that includes 1, 2, 3, 4, 5, 6, 7, 8, 9, 10, 11, 12, 13, 14, 15, 16, 17, 18, 19, 20, 21, 22, 23, 24, 25, 26, 27, 28, 29, 30, 31, 32, 33, 34, 35 amino acid position(s) having a value greater than 0.5 in the Beta-turn profile of FIG. 9;

[0197] (XXVIII) a polynucleotide that encodes a peptide region of at least 5, 6, 7, 8, 9, 10, 11, 12, 13, 14, 15, 16, 17, 18, 19, 20, 21, 22, 23, 24, 25, 26, 27, 28, 29, 30, 31, 32, 33, 34, 35 amino acids of a peptide of FIG. 3D in any whole number increment up to 114 that includes 1, 2, 3, 4, 5, 6, 7, 8, 9, 10, 11, 12, 13, 14, 15, 16, 17, 18, 19, 20, 21, 22, 23, 24, 25, 26, 27, 28, 29, 30, 31, 32, 33, 34, 35 amino acid position(s) having a value greater than 0.5 in the Hydrophilicity profile of FIG. 5

[0198] (XXIX) a polynucleotide that encodes a peptide region of at least 5, 6, 7, 8, 9, 10, 11, 12, 13, 14, 15, 16, 17, 18, 19, 20, 21, 22, 23, 24, 25, 26, 27, 28, 29, 30, 31, 32, 33, 34, 35 amino acids of a peptide of FIG. 3D in any whole number increment up to 114 that includes 1, 2, 3, 4, 5, 6, 7, 8, 9, 10, 11, 12, 13, 14, 15, 16, 17, 18, 19, 20, 21, 22, 23, 24, 25, 26, 27, 28, 29, 30, 31, 32, 33, 34, 35 amino acid position(s) having a value less than 0.5 in the Hydropathicity profile of FIG. 6;

[0199] (XXX) a polynucleotide that encodes a peptide region of at least 5, 6, 7, 8, 9, 10, 11, 12, 13, 14, 15, 16, 17, 18, 19, 20, 21, 22, 23, 24, 25, 26, 27, 28, 29, 30, 31, 32, 33, 34, 35 amino acids of a peptide of FIG. 3D in any whole number increment up to 114 that includes 1, 2, 3, 4, 5, 6, 7, 8, 9, 10, 11, 12, 13, 14, 15, 16, 17, 18, 19, 20, 21, 22, 23, 24, 25, 26, 27, 28, 29, 30, 31, 32, 33, 34, 35 amino acid position(s) having a value greater than 0.5 in the Percent Accessible Residues profile of FIG. 7;

[0200] (XXXI) a polynucleotide that encodes a peptide region of at least 5, 6, 7, 8, 9, 10, 11, 12, 13, 14, 15, 16, 17, 18, 19, 20, 21, 22, 23, 24, 25, 26, 27, 28, 29, 30, 31, 32, 33, 34, 35 amino acids of a peptide of FIG. 3D in any whole number increment up to 114 that includes 1, 2, 3, 4, 5, 6, 7, 8, 9, 10, 11, 12, 13, 14, 15, 16, 17, 18, 19, 20, 21, 22, 23, 24, 25, 26, 27, 28, 29, 30, 31, 32, 33, 34, 35 amino acid position(s) having a value greater than 0.5 in the Average Flexibility profile of FIG. 8;

[0201] (XXXII) a polynucleotide that encodes a peptide region of at least 5, 6, 7, 8, 9, 10, 11, 12, 13, 14, 15, 16, 17, 18, 19, 20, 21, 22, 23, 24, 25, 26, 27, 28, 29, 30, 31, 32, 33, 34, 35 amino acids of a peptide of FIG. 3D in any whole number increment up to 114 that includes 1, 2, 3, 4, 5, 6, 7, 8, 9, 10, 11, 12, 13, 14, 15, 16, 17, 18, 19, 20, 21, 22, 23, 24, 25, 26, 27, 28, 29, 30, 31, 32, 33, 34, 35 amino acid position(s) having a value greater than 0.5 in the Beta-turn profile of FIG. 9;

[0202] (XXXIII) a polynucleotide that is fully complementary to a polynucleotide of any one of (I)-(XXXII).

[0203] (XXXIV) a peptide that is encoded by any of (I) to (XXXIII); and;

[0204] (XXXV) a composition comprising a polynucleotide of any of (I)-(XXXIII) or peptide of (XXXIV) together with a pharmaceutical excipient and/or in a human unit dose form;

[0205] (XXXVI) a method of using a polynucleotide of any (I)-(XXXIII) or peptide of (XXXIV) or a composition of (XXXV) in a method to modulate a cell expressing PSCA,;

[0206] (XXXVII) a method of using a polynucleotide of any (I)-(XXXIII) or peptide of (XXXIV) or a composition of (XXXV) in a method to diagnose, prophylax, prognose, or treat an individual who bears a cell expressing PSCA;

[0207] (XXXVIII) a method of using a polynucleotide of any (I)-(XXXIII) or peptide of (XXXIV) or a composition of (XXXV) in a method to diagnose, prophylax, prognose, or treat an individual who bears a cell expressing PSCA, said cell from a cancer of a tissue listed in Table I

[0208] (XXXIX) a method of using a polynucleotide of any (I)-(XXXIII) or peptide of (XXXIV) or a composition of (XXXV) in a method to diagnose, prophylax, prognose, or treat a a cancer

[0209] (XL) a method of using a polynucleotide of any (I)-(XXXIII) or peptide of (XXXIV) or a composition of (XXXV) in a method to diagnose, prophylax, prognose, or treat a a cancer of a issue listed in Table l; and;

[0210] (XLI) a method of using a polynucleotide of any (I)-(XXXIII) or peptide of (XXXIV) or a composition of (XXXV) in a method to identify or characterize a modulator of a cell expressing PSCA.

[0211] As used herein, a range is understood to disclose specifically all whole unit positions thereof.

[0212] Typical embodiments of the invention disclosed herein include PSCA polynucleotides that encode specific portions of PSCA mRNA sequences (and those which are complementary to such sequences) such as those that encode the proteins and/or fragments thereof, for example:

[0213] (a) 4, 5, 6, 7, 8, 9, 10, 11, 12, 13, 14, 15, 16, 17, 18, 19, 20, 21, 22, 23, 24, 25, 30, 35, 40, 45, 50, 55, 60, 65, 70, 75, 80, 85, 90, 95, 100, 105, 110, 115, 120, and 123 or more contiguous amino acids of PSCA variant 1; the maximal lengths relevant for other variants are: variant 3, 94 amino acids; variant 4, 189 amino acids, variant 6, 114 amino acids, variant 19, 189 amino acids, variant 20, 189 amoni acids, variant 21, 189 amino acids, variant 22, 189 amino acids, variant 24, 189 amino acids, variant 25, 189 amino acids, variant 26, 189 amino acids, and variant 27, 189 amino acids.

[0214] For example, representative embodiments of the invention disclosed herein include: polynucleotides and their encoded peptides themselves encoding about amino acid 1 to about amino acid 10 of the PSCA protein shown in FIG. 2 or FIG. 3, polynucleotides encoding about amino acid 10 to about amino acid 20 of the PSCA protein shown in FIG. 2 or FIG. 3, polynucleotides encoding about amino acid 20 to about amino acid 30 of the PSCA protein shown in FIG. 2 or FIG. 3, polynucleotides encoding about amino acid 30 to about amino acid 40 of the PSCA protein shown in FIG. 2 or FIG. 3, polynucleotides encoding about amino acid 40 to about amino acid 50 of the PSCA protein shown in FIG. 2 or FIG. 3, polynucleotides encoding about amino acid 50 to about amino acid 60 of the PSCA protein shown in FIG. 2 or FIG. 3, polynucleotides encoding about amino acid 60 to about amino acid 70 of the PSCA protein shown in FIG. 2 or FIG. 3, polynucleotides encoding about amino acid 70 to about amino acid 80 of the PSCA protein shown in FIG. 2 or FIG. 3, polynucleotides encoding about amino acid 80 to about amino acid 90 of the PSCA protein shown in FIG. 2 or FIG. 3, polynucleotides encoding about amino acid 90 to about amino acid 100 of the PSCA protein shown in FIG. 2 or FIG. 3, in increments of about 10 amino acids, ending at the carboxyl terminal amino acid set forth in FIG. 2 or FIG. 3. Accordingly, polynucleotides encoding portions of the amino acid sequence (of about 10 amino acids), of amino acids, 100 through the carboxyl terminal amino acid of the PSCA protein are embodiments of the invention. Wherein it is understood that each particular amino acid position discloses that position plus or minus five amino acid residues.

[0215] Polynucleotides encoding relatively long portions of a PSCA protein are also within the scope of the invention. For example, polynucleotides encoding from about amino acid 1 (or 20 or 30 or 40 etc.) to about amino acid 20, (or 30, or 40 or 50 etc.) of the PSCA protein “or variant” shown in FIG. 2 or FIG. 3 can be generated by a variety of techniques well known in the art. These polynucleotide fragments can include any portion of the PSCA sequence as shown in FIG. 2.

[0216] Additional illustrative embodiments of the invention disclosed herein include PSCA polynucleotide fragments encoding one or more of the biological motifs contained within a PSCA protein “or variant” sequence, including one or more of the motif-bearing subsequences of a PSCA protein “or variant” set forth in Tables VIII-XXI and XXII-XLIX. In another embodiment, typical polynucleotide fragments of the invention encode one or more of the regions of PSCA protein or variant that exhibit homology to a known molecule. In another embodiment of the invention, typical polynucleotide fragments can encode one or more of the PSCA protein or variant N-glycosylation sites, cAMP and cGMP-dependent protein kinase phosphorylation sites, casein kinase II phosphorylation sites or N-myristoylation site and amidation sites.

[0217] Note that to determine the starting position of any peptide set forth in Tables VIII-XXI and Tables XXII to XLIX (collectively HLA Peptide Tables) respective to its parental protein, e.g., variant 1, variant 2, etc., reference is made to three factors: the particular variant, the length of the peptide in an HLA Peptide Table, and the Search Peptides listed in Table VII. Generally, a unique Search Peptide is used to obtain HLA peptides for a particular variant. The position of each Search Peptide relative to its respective parent molecule is listed in Table VII. Accordingly, if a Search Peptide begins at position “X”, one must add the value “X minus 1” to each position in Tables VIII-XXI and Tables XXII-IL to obtain the actual position of the HLA peptides in their parental molecule. For example if a particular Search Peptide begins at position 150 of its parental molecule, one must add 150−1, i.e., 149 to each HLA peptide amino acid position to calculate the position of that amino acid in the parent molecule.

[0218] II.A.) Uses of PSCA Polynucleotides

[0219] II.A.1.) Monitoring of Genetic Abnormalities

[0220] The polynucleotides of the preceding paragraphs have a number of different specific uses. The human PSCA gene maps to the chromosomal location set forth in the Example entitled “Chromosomal Mapping of PSCA.” For example, because the PSCA gene maps to this chromosome, polynucleotides that encode different regions of the PSCA proteins are used to characterize cytogenetic abnormalities of this chromosomal locale, such as abnormalities that are identified as being associated with various cancers. In certain genes, a variety of chromosomal abnormalities including rearrangements have been identified as frequent cytogenetic abnormalities in a number of different cancers (see e.g. Krajinovic et al., Mutat. Res. 382(3-4): 81-83(1998); Johansson et al., Blood 86(10): 3905-3914 (1995) and Finger et al., P.N.A.S. 85(23): 9158-9162 (1988)). Thus, polynucleotides encoding specific regions of the PSCA proteins provide new tools that can be used to delineate, with greater precision than previously possible, cytogenetic abnormalities in the chromosomal region that encodes PSCA that may contribute to the malignant phenotype. In this context, these polynucleotides satisfy a need in the art for expanding the sensitivity of chromosomal screening in order to identify more subtle and less common chromosomal abnormalities (see e.g. Evans et al., Am. J. Obstet. Gynecol 171(4): 1055-1057 (1994)).

[0221] Furthermore, as PSCA was shown to be highly expressed in prostate and other cancers, PSCA polynucleotides are used in methods assessing the status of PSCA gene products in normal versus cancerous tissues. Typically, polynucleotides that encode specific regions of the PSCA proteins are used to assess the presence of perturbations (such as deletions, insertions, point mutations, or alterations resulting in a loss of an antigen etc.) in specific regions of the PSCA gene, such as regions containing one or more motifs. Exemplary assays include both RT-PCR assays as well as single-strand conformation polymorphism (SSCP) analysis (see, e.g., Marrogi et al., J. Cutan. Pathol. 26(8): 369-378 (1999), both to which utilize polynucleotides encoding specific regions of a protein to examine these regions within the protein.

[0222] II.A.2.) Antisense Embodiments

[0223] Other specifically contemplated nucleic acid related embodiments of the invention disclosed herein are genomic DNA, cDNAs, ribozymes, and antisense molecules, as well as nucleic acid molecules based on an alternative backbone, or including alternative bases, whether derived from natural sources or synthesized, and include molecules capable of inhibiting the RNA or protein expression of PSCA. For example, antisense molecules can be RNAs or other molecules, including peptide nucleic acids (PNAs) or non-nucleic acid molecules such as phosphorothioate derivatives that specifically bind DNA or RNA in a base pair-dependent manner. A skilled artisan can readily obtain these classes of nucleic acid molecules using the PSCA polynucleotides and polynucleotide sequences disclosed herein.

[0224] Antisense technology entails the administration of exogenous oligonucleotides that bind to a target polynucleotide located within the cells. The term “antisense” refers to the fact that such oligonucleotides are complementary to their intracellular targets, e.g., PSCA. See for example, Jack Cohen, Oligodeoxynucleotides, Antisense Inhibitors of Gene Expression, CRC Press, 1989; and Synthesis 1:1-5 (1988). The PSCA antisense oligonucleotides of the present invention include derivatives such as S-oligonucleotides (phosphorothioate derivatives or S-oligos, see, Jack Cohen, supra), which exhibit enhanced cancer cell growth inhibitory action. S-oligos (nucleoside phosphorothioates) are isoelectronic analogs of an oligonucleotide (O-oligo) in which a nonbridging oxygen atom of the phosphate group is replaced by a sulfur atom. The S-oligos of the present invention can be prepared by treatment of the corresponding O-oligos with 3H-1,2-benzodithiol-3-one-1,1-dioxide, which is a sulfur transfer reagent. See, e.g., Iyer, R. P. et al., J. Org. Chem. 55:4693-4698 (1990); and Iyer, R. P. al., J. Am. Chem. Soc. 112:1253-1254 (1990). Additional PSCAantisense oligonucleotides of the present invention include morpholino antisense oligonucleotides known in the art (see, e.g., Partridge et al., 1996, Antisense & Nucleic Acid Drug Development 6: 169-175).

[0225] The PSCA antisense oligonucleotides of the present invention typically can be RNA or DNA that is complementary to and stably hybridizes with the first 100 5′ codons or last 100 3′ codons of a PSCA genomic sequence or the corresponding mRNA. Absolute complementarity is not required, although high degrees of complementarity are preferred. Use of an oligonucleotide complementary to this region allows for the selective hybridization to PSCA mRNA and not to mRNA specifying other regulatory subunits of protein kinase. In one embodiment, PSCA antisense oligonucleotides of the present invention are 15 to 30-mer fragments of the antisense DNA molecule that have a sequence that hybridizes to PSCA mRNA. Optionally, PSCA antisense oligonucleotide is a 30-mer oligonucleotide that is complementary to a region in the first 10 5′ codons or last 10 3′ codons of PSCA. Alternatively, the antisense molecules are modified to employ ribozymes in the inhibition of PSCA expression, see, e.g., L. A. Couture & D. T. Stinchcomb; Trends Genet 12: 510-515 (1996).

[0226] II.A.3.) Primers and Primer Pairs

[0227] Further specific embodiments of these nucleotides of the invention include primers and primer pairs, which allow the specific amplification of polynucleotides of the invention or of any specific parts thereof, and probes that selectively or specifically hybridize to nucleic acid molecules of the invention or to any part thereof. Probes can be labeled with a detectable marker, such as, for example, a radioisotope, fluorescent compound, bioluminescent compound, a chemiluminescent compound, metal chelator or enzyme. Such probes and primers are used to detect the presence of a PSCA polynucleotide in a sample and as a means for detecting a cell expressing a PSCA protein.

[0228] Examples of such probes include polypeptides comprising all or part of the human PSCA cDNA sequence shown in FIG. 2. Examples of primer pairs capable of specifically amplifying PSCA mRNAs are also described in the Examples. As will be understood by the skilled artisan, a great many different primers and probes can be prepared based on the sequences provided herein and used effectively to amplify and/or detect a PSCA mRNA.

[0229] The PSCA polynucleotides of the invention are useful for a variety of purposes, including but not limited to their use as probes and primers for the amplification and/or detection of the PSCA gene(s), mRNA(s), or fragments thereof; as reagents for the diagnosis and/or prognosis of prostate cancer and other cancers; as coding sequences capable of directing the expression of PSCA polypeptides; as tools for modulating or inhibiting the expression of the PSCA gene(s) and/or translation of the PSCA transcript(s); and as therapeutic agents.

[0230] The present invention includes the use of any probe as described herein to identify and isolate a PSCA or PSCA related nucleic acid sequence from a naturally occurring source, such as humans or other mammals, as well as the isolated nucleic acid sequence per se, which would comprise all or most of the sequences found in the probe used.

[0231] II.A.4.) Isolation of PSCA-Encoding Nucleic Acid Molecules

[0232] The PSCA cDNA sequences described herein enable the isolation of other polynucleotides encoding PSCA gene product(s), as well as the isolation of polynucleotides encoding PSCA gene product homologs, alternatively spliced isoforms, allelic variants, and mutant forms of a PSCA gene product as well as polynucleotides that encode analogs of PSCA-related proteins. Various molecular cloning methods that can be employed to isolate full length cDNAs encoding a PSCA gene are well known (see, for example, Sambrook, J. et al., Molecular Cloning: A Laboratory Manual, 2d edition, Cold Spring Harbor Press, New York, 1989; Current Protocols in Molecular Biology. Ausubel et al., Eds., Wiley and Sons, 1995). For example, lambda phage cloning methodologies can be conveniently employed, using commercially available cloning systems (e.g., Lambda ZAP Express, Stratagene). Phage clones containing PSCA gene cDNAs can be identified by probing with a labeled PSCA cDNA or a fragment thereof. For example, in one embodiment, a PSCA cDNA (e.g., FIG. 2) or a portion thereof can be synthesized and used as a probe to retrieve overlapping and full-length cDNAs corresponding to a PSCA gene. A PSCA gene itself can be isolated by screening genomic DNA libraries, bacterial artificial chromosome libraries (BACs), yeast artificial chromosome libraries (YACs), and the like, with PSCA DNA probes or primers.

[0233] II.A.5.) Recombinant Nucleic Acid Molecules and Host-Vector Systems

[0234] The invention also provides recombinant DNA or RNA molecules containing a PSCA polynucleotide, a fragment, analog or homologue thereof, including but not limited to phages, plasmids, phagemids, cosmids, YACs, BACs, as well as various viral and non-viral vectors well known in the art, and cells transformed or transfected with such recombinant DNA or RNA molecules. Methods for generating such molecules are well known (see, for example, Sambrook et al., 1989, supra).

[0235] The invention further provides a host-vector system comprising a recombinant DNA molecule containing a PSCA polynucleotide, fragment, analog or homologue thereof within a suitable prokaryotic or eukaryotic host cell. Examples of suitable eukaryotic host cells include a yeast cell, a plant cell, or an animal cell, such as a mammalian cell or an insect cell (e.g., a baculovirus-infectible cell such as an Sf9 or HighFive cell). Examples of suitable mammalian cells include various prostate cancer cell lines such as DU145 and TsuPr1, other transfectable or transducible prostate cancer cell lines, primary cells (PrEC), as well as a number of mammalian cells routinely used for the expression of recombinant proteins (e.g., COS, CHO, 293, 293T cells). More particularly, a polynucleotide comprising the coding sequence of PSCA or a fragment, analog or homolog thereof can be used to generate PSCA proteins or fragments thereof using any number of host-vector systems routinely used and widely known in the art.

[0236] A wide range of host-vector systems suitable for the expression of PSCA proteins or fragments thereof are available, see for example, Sambrook et al., 1989, supra; Current Protocols in Molecular Biology, 1995, supra). Preferred vectors for mammalian expression include but are not limited to pcDNA 3.1 myc-His-tag (Invitrogen) and the retroviral vector pSRαtkneo (Muller et al., 1991, MCB 11:1785). Using these expression vectors, PSCA can be expressed in several prostate cancer and non-prostate cell lines, including for example 293, 293T, rat-1, NIH 3T3 and TsuPr1. The host-vector systems of the invention are useful for the production of a PSCA protein or fragment thereof. Such host-vector systems can be employed to study the functional properties of PSCA and PSCA mutations or analogs.

[0237] Recombinant human PSCA protein or an analog or homolog or fragment thereof can be produced by mammalian cells transfected with a construct encoding a PSCA-related nucleotide. For example, 293T cells can be transfected with an expression plasmid encoding PSCA or fragment, analog or homolog thereof, a PSCA-related protein is expressed in the 293T cells, and the recombinant PSCA protein is isolated using standard purification methods (e.g., affinity purification using anti-PSCA antibodies). In another embodiment, a PSCA coding sequence is subcloned into the retroviral vector pSRαMSVtkneo and used to infect various mammalian cell lines, such as NIH 3T3, TsuPr1, 293 and rat-1 in order to establish PSCA expressing cell lines. Various other expression systems well known in the art can also be employed. Expression constructs encoding a leader peptide joined in frame to a PSCA coding sequence can be used for the generation of a secreted form of recombinant PSCA protein.

[0238] As discussed herein, redundancy in the genetic code permits variation in PSCA gene sequences. In particular, it is known in the art that specific host species often have specific codon preferences, and thus one can adapt the disclosed sequence as preferred for a desired host. For example, preferred analog codon sequences typically have rare codons (i.e., codons having a usage frequency of less than about 20% in known sequences of the desired host) replaced with higher frequency codons. Codon preferences for a specific species are calculated, for example, by utilizing codon usage tables available on the INTERNET such as at URL dna.affrc.go.jp/˜nakamura/codon.html.

[0239] Additional sequence modifications are known to enhance protein expression in a cellular host. These include elimination of sequences encoding spurious polyadenylation signals, exon/intron splice site signals, transposon-like repeats, and/or other such well-characterized sequences that are deleterious to gene expression. The GC content of the sequence is adjusted to levels average for a given cellular host, as calculated by reference to known genes expressed in the host cell. Where possible, the sequence is modified to avoid predicted hairpin secondary mRNA structures. Other useful modifications include the addition of a translational initiation consensus sequence at the start of the open reading frame, as described in Kozak, Mol. Cell Biol., 9:5073-5080 (1989). Skilled artisans understand that the general rule that eukaryotic ribosomes initiate translation exclusively at the 5′ proximal AUG codon is abrogated only under rare conditions (see, e.g., Kozak PNAS 92(7): 2662-2666, (1995) and Kozak NAR 15(20): 8125-8148 (1987)).

[0240] III.) PSCA-Related Proteins

[0241] Another aspect of the present invention provides PSCA-related proteins. Specific embodiments of PSCA proteins comprise a polypeptide having all or part of the amino acid sequence of human PSCA as shown in FIG. 2 or FIG. 3. Alternatively, embodiments of PSCA proteins comprise variant, homolog or analog polypeptides that have alterations in the amino acid sequence of PSCA shown in FIG. 2 or FIG. 3.

[0242] Embodiments of a PSCA polypeptide include: a PSCA polypeptide having a sequence shown in FIG. 2, a peptide sequence of a PSCA as shown in FIG. 2 wherein T is U; at least 10 contiguous nucleotides of a polypeptide having the sequence as shown in FIG. 2; or, at least 10 contiguous peptides of a polypeptide having the sequence as shown in FIG. 2 where T is U. For example, embodiments of PSCA peptides comprise, without limitation:(l) a protein comprising, consisting essentially of, or consisting of an amino acid sequence as shown in FIG. 2A-H or FIG. 3A-L;

[0243] (II) a PSCA-related protein that is at least 90, 91, 92, 93, 94, 95, 96, 97, 98, 99 or 100% homologous to an entire amino acid sequence shown in FIG. 2A-H or 3A-L;

[0244] (III) a PSCA-related protein that is at least 90, 91, 92, 93, 94, 95, 96, 97, 98, 99 or 100% identical to an entire amino acid sequence shown in FIG. 2A-H or 3A-L;

[0245] (IV) a protein that comprises at least one peptide set forth in Tables VIII to XLIX, optionally with a proviso that it is not an entire protein of FIG. 2;

[0246] (V) a protein that comprises at least one peptide set forth in Tables VIII-XXI, collectively, which peptide is also set forth in Tables XXII to XLIX, collectively, optionally with a proviso that it is not an entire protein of FIG. 2;

[0247] (VI) a protein that comprises at least two peptides selected from the peptides set forth in Tables VIII-XLIX, optionally with a proviso that it is not an entire protein of FIG. 2;

[0248] (VII) a protein that comprises at least two peptides selected from the peptides set forth in Tables VIII to XLIX collectively, with a proviso that the protein is not a contiguous sequence from an amino acid sequence of FIG. 2;

[0249] (VIII) a protein that comprises at least one peptide selected from the peptides set forth in Tables VIII-XXI; and at least one peptide selected from the peptides set forth in Tables XXII to XLIX, with a proviso that the protein is not a contiguous sequence from an amino acid sequence of FIG. 2;

[0250] (IX) a polypeptide comprising at least 5, 6, 7, 8, 9, 10, 11, 12, 13, 14, 15, 16, 17, 18, 19, 20, 21, 22, 23, 24, 25, 26, 27, 28, 29, 30, 31, 32, 33, 34, 35 amino acids of a protein of FIG. 3A in any whole number increment up to 123 respectively that includes at least 1, 2, 3, 4, 5, 6, 7, 8, 9, 10, 11, 12, 13, 14, 15, 16, 17, 18, 19, 20, 21, 22, 23, 24, 25, 26, 27, 28, 29, 30, 31, 32, 33, 34, 35 amino acid position(s) having a value greater than 0.5 in the Hydrophilicity profile of FIG. 5;

[0251] (X) a polypeptide comprising at least 5, 6, 7, 8, 9, 10, 11, 12, 13, 14, 15, 16, 17, 18, 19, 20, 21, 22, 23, 24, 25, 26, 27, 28, 29, 30, 31, 32, 33, 34, 35 amino acids of a protein of FIG. 3A, in any whole number increment up to 123 respectively that includes at least at least 1, 2, 3, 4, 5, 6, 7, 8, 9, 10, 11, 12, 13, 14, 15, 16, 17, 18, 19, 20, 21, 22, 23, 24, 25, 26, 27, 28, 29, 30, 31, 32, 33, 34, 35 amino acid position(s) having a value less than 0.5 in the Hydropathicity profile of FIG. 6;

[0252] (XI) a polypeptide comprising at least 5, 6, 7, 8, 9, 10, 11, 12, 13, 14, 15, 16, 17, 18, 19, 20, 21, 22, 23, 24, 25, 26, 27, 28, 29, 30, 31, 32, 33, 34, 35 amino acids of a protein of FIG. 3A, in any whole number increment up to 123 respectively that includes at least at least 1, 2, 3, 4, 5, 6, 7, 8, 9, 10, 11, 12, 13, 14, 15, 16, 17, 18, 19, 20, 21, 22, 23, 24, 25, 26, 27, 28, 29, 30, 31, 32, 33, 34, 35 amino acid position(s) having a value greater than 0.5 in the Percent Accessible Residues profile of FIG. 7;

[0253] (XII) a polypeptide comprising at least 5, 6, 7, 8, 9, 10, 11, 12, 13, 14, 15, 16, 17, 18, 19, 20, 21, 22, 23, 24, 25, 26, 27, 28, 29, 30, 31, 32, 33, 34, 35 amino acids of a protein of FIG. 3A, in any whole number increment up to 123 respectively that includes at least at least 1, 2, 3, 4, 5, 6, 7, 8, 9, 10, 11, 12, 13, 14, 15, 16, 17, 18, 19, 20, 21, 22, 23, 24, 25, 26, 27, 28, 29, 30, 31, 32, 33, 34, 35 amino acid position(s) having a value greater than 0.5 in the Average Flexibility profile of FIG. 8;

[0254] (XIII) a polypeptide comprising at least 5, 6, 7, 8, 9, 10, 11, 12, 13, 14, 15, 16, 17, 18, 19, 20, 21, 22, 23, 24, 25, 26, 27, 28, 29, 30, 31, 32, 33, 34, amino acids of a protein of FIG. 3A in any whole number increment up to 123 respectively that includes at least at least 1, 2, 3, 4, 5, 6, 7, 8, 9, 10, 11, 12, 13, 14, 15, 16, 17, 18, 19, 20, 21, 22, 23, 24, 25, 26, 27, 28, 29, 30, 31, 32, 33, 34, 35 amino acid position(s) having a value greater than 0.5 in the Beta-turn profile of FIG. 9;

[0255] (XIV) a polypeptide comprising at least 5, 6, 7, 8, 9, 10, 11, 12, 13, 14, 15, 16, 17, 18, 19, 20, 21, 22, 23, 24, 25, 26, 27, 28, 29, 30, 31, 32, 33, 34, 35 amino acids of a protein of FIG. 3B, in any whole number increment up to 94 respectively that includes at least 1, 2, 3, 4, 5, 6, 7, 8, 9, 10, 11, 12, 13, 14, 15, 16, 17, 18, 19, 20, 21, 22, 23, 24, 25, 26, 27, 28, 29, 30, 31, 32, 33, 34, 35 amino acid position(s) having a value greater than 0.5 in the Hydrophilicity profile of FIG. 5;

[0256] (XV) a polypeptide comprising at least 5, 6, 7, 8, 9, 10, 11, 12, 13, 14, 15, 16, 17, 18, 19, 20, 21, 22, 23, 24, 25, 26, 27, 28, 29, 30, 31, 32, 33, 34, 35 amino acids of a protein of FIG. 3B, in any whole number increment up to 94 respectively that includes at least at least 1, 2, 3, 4, 5, 6, 7, 8, 9, 10, 11, 12, 13, 14, 15, 16, 17, 18, 19, 20, 21, 22, 23, 24, 25, 26, 27, 28, 29, 30, 31, 32, 33, 34, 35 amino acid position(s) having a value less than 0.5 in the Hydropathicity profile of FIG. 6;

[0257] (XVI) a polypeptide comprising at least 5, 6, 7, 8, 9, 10, 11, 12, 13, 14, 15, 16, 17, 18, 19, 20, 21, 22, 23, 24, 25, 26, 27, 28, 29, 30, 31, 32, 33, 34, 35 amino acids of a protein of FIG. 3B, in any whole number increment up to 94 respectively that includes at least at least 1, 2, 3, 4, 5, 6, 7, 8, 9, 10, 11, 12, 13, 14, 15, 16, 17, 18, 19, 20, 21, 22, 23, 24, 25, 26, 27, 28, 29, 30, 31, 32, 33, 34, 35 amino acid position(s) having a value greater than 0.5 in the Percent Accessible Residues profile of FIG. 7;

[0258] (XVII) a polypeptide comprising at least 5, 6, 7, 8, 9, 10, 11, 12, 13, 14, 15, 16, 17, 18, 19, 20, 21, 22, 23, 24, 25, 26, 27, 28, 29, 30, 31, 32, 33, 34, 35 amino acids of a protein of FIG. 3B, in any whole number increment up to 94 respectively that includes at least at least 1, 2, 3, 4, 5, 6, 7, 8, 9, 10, 11, 12, 13, 14, 15, 16, 17, 18, 19, 20, 21, 22, 23, 24, 25, 26, 27, 28, 29, 30, 31, 32, 33, 34, 35 amino acid position(s) having a value greater than 0.5 in the Average Flexibility profile of FIG. 8;

[0259] (XVIII) a polypeptide comprising at least 5, 6, 7, 8, 9, 10, 11, 12, 13, 14, 15, 16, 17, 18, 19, 20, 21, 22, 23, 24, 25, 26, 27, 28, 29, 30, 31, 32, 33, 34, amino acids of a protein of FIG. 3B in any whole number increment up to 94 respectively that includes at least at least 1, 2, 3, 4, 5, 6, 7, 8, 9, 10, 11, 12, 13, 14, 15, 16, 17, 18, 19, 20, 21, 22, 23, 24, 25, 26, 27, 28, 29, 30, 31, 32, 33, 34, 35 amino acid position(s) having a value greater than 0.5 in the Beta-turn profile of FIG. 9;

[0260] (XIX) a polypeptide comprising at least 5, 6, 7, 8, 9, 10, 11, 12, 13, 14, 15, 16, 17, 18, 19, 20, 21, 22, 23, 24, 25, 26, 27, 28, 29, 30, 31, 32, 33, 34, 35 amino acids of a protein of FIG. 3C, 3E-3L in any whole number increment up to 189 respectively that includes at least 1, 2, 3, 4, 5, 6, 7, 8, 9, 10, 11, 12, 13, 14, 15, 16, 17, 18, 19, 20, 21, 22, 23, 24, 25, 26, 27, 28, 29, 30, 31, 32, 33, 34, 35 amino acid position(s) having a value greater than 0.5 in the Hydrophilicity profile of FIG. 5;

[0261] (XX) a polypeptide comprising at least 5, 6, 7, 8, 9, 10, 11, 12, 13, 14, 15, 16, 17, 18, 19, 20, 21, 22, 23, 24, 25, 26, 27, 28, 29, 30, 31, 32, 33, 34, 35 amino acids of a protein of FIG. 3C, 3E-3L in any whole number increment up to 189 respectively that includes at least at least 1, 2, 3, 4, 5, 6, 7, 8, 9, 10, 11, 12, 13, 14, 15, 16, 17, 18, 19, 20, 21, 22, 23, 24, 25, 26, 27, 28, 29, 30, 31, 32, 33, 34, 35 amino acid position(s) having a value less than 0.5 in the Hydropathicity profile of FIG. 6;

[0262] (XXI) a polypeptide comprising at least 5, 6, 7, 8, 9, 10, 11, 12, 13, 14, 15,16, 17, 18, 19, 20, 21, 22, 23, 24, 25, 26, 27, 28, 29, 30, 31, 32, 33, 34, 35 amino acids of a protein of FIG. 3C, 3E-3L in any whole number increment up to 189 respectively that includes at least at least 1, 2, 3, 4, 5, 6, 7, 8, 9, 10, 11, 12, 13, 14, 15, 16, 17, 18, 19, 20, 21, 22, 23, 24, 25, 26, 27, 28, 29, 30, 31, 32, 33, 34, 35 amino acid position(s) having a value greater than 0.5 in the Percent Accessible Residues profile of FIG. 7;

[0263] (XXII) a polypeptide comprising at least 5, 6, 7, 8, 9, 10, 11, 12, 13, 14, 15, 16, 17, 18, 19, 20, 21, 22, 23, 24, 25, 26, 27, 28, 29, 30, 31, 32, 33, 34, 35 amino acids of a protein of FIG. 3C, 3E-3L in any whole number increment up to 189 respectively that includes at least at least 1, 2, 3, 4, 5, 6, 7, 8, 9, 10, 11, 12, 13, 14, 15, 16, 17, 18, 19, 20, 21, 22, 23, 24, 25, 26, 27, 28, 29, 30, 31, 32, 33, 34, 35 amino acid position(s) having a value greater than 0.5 in the Average Flexibility profile of FIG. 8;

[0264] (XXIII) a polypeptide comprising at least 5, 6, 7, 8, 9, 10, 11, 12, 13, 14, 15, 16, 17, 18, 19, 20, 21, 22, 23, 24, 25, 26, 27, 28, 29, 30, 31, 32, 33, 34, amino acids of a protein of FIG. 3C, 3E-3L in any whole number increment up to 189 respectively that includes at least at least 1, 2, 3, 4, 5, 6, 7, 8, 9, 10, 11, 12, 13, 14, 15, 16, 17, 18, 19, 20, 21, 22, 23, 24, 25, 26, 27, 28, 29, 30, 31, 32, 33, 34, 35 amino acid position(s) having a value greater than 0.5 in the Beta-turn profile of FIG. 9;

[0265] (XXIV) a polypeptide comprising at least 5, 6, 7, 8, 9, 10, 11, 12, 13, 14, 15, 16, 17, 18, 19, 20, 21, 22, 23, 24, 25, 26, 27, 28, 29, 30, 31, 32, 33, 34, 35 amino acids of a protein of FIG. 3D, in any whole number increment up to 114 respectively that includes at least 1, 2, 3, 4, 5, 6, 7, 8, 9, 10, 11, 12, 13, 14, 15, 16, 17, 18, 19, 20, 21, 22, 23, 24, 25, 26, 27, 28, 29, 30, 31, 32, 33, 34, 35 amino acid position(s) having a value greater than 0.5 in the Hydrophilicity profile of FIG. 5;

[0266] (XXV) a polypeptide comprising at least 5, 6, 7, 8, 9, 10, 11, 12, 13, 14, 15, 16, 17, 18, 19, 20, 21, 22, 23, 24, 25, 26, 27, 28, 29, 30, 31, 32, 33, 34, 35 amino acids of a protein of FIG. 3D, in any whole number increment up to 114 respectively that includes at least at least 1, 2, 3, 4, 5, 6, 7, 8, 9, 10, 11, 12, 13, 14, 15, 16, 17, 18, 19, 20, 21, 22, 23, 24, 25, 26, 27, 28, 29, 30, 31, 32, 33, 34, 35 amino acid position(s) having a value less than 0.5 in the Hydropathicity profile of FIG. 6;

[0267] (XXVI) a polypeptide comprising at least 5, 6, 7, 8, 9, 10, 11, 12, 13, 14, 15, 16, 17, 18, 19, 20, 21, 22, 23, 24, 25, 26, 27, 28, 29, 30, 31, 32, 33, 34, 35 amino acids of a protein of FIG. 3D, in any whole number increment up to 114 respectively that includes at least at least 1, 2, 3, 4, 5, 6, 7, 8, 9, 10, 11, 12, 13, 14, 15, 16, 17, 18, 19, 20, 21, 22, 23, 24, 25, 26, 27, 28, 29, 30, 31, 32, 33, 34, 35 amino acid position(s) having a value greater than 0.5 in the Percent Accessible Residues profile of FIG. 7;

[0268] (XXVII) a polypeptide comprising at least 5, 6, 7, 8, 9, 10, 11, 12, 13, 14, 15, 16, 17, 18, 19, 20, 21, 22, 23, 24, 25, 26, 27, 28, 29, 30, 31, 32, 33, 34, 35 amino acids of a protein of FIG. 3D, in any whole number increment up to 114 respectively that includes at least at least 1, 2, 3, 4, 5, 6, 7, 8, 9, 10, 11, 12, 13, 14, 15, 16, 17, 18, 19, 20, 21, 22, 23, 24, 25, 26, 27, 28, 29, 30, 31, 32, 33, 34, 35 amino acid position(s) having a value greater than 0.5 in the Average Flexibility profile of FIG. 8;

[0269] (XXVIII) a polypeptide comprising at least 5, 6, 7, 8, 9, 10, 11, 12, 13, 14, 15, 16, 17, 18, 19, 20, 21, 22, 23, 24, 25, 26, 27, 28, 29, 30, 31, 32, 33, 34, amino acids of a protein of FIG. 3D in any whole number increment up to 114 respectively that includes at least at least 1, 2, 3, 4, 5, 6, 7, 8, 9, 10, 11, 12, 13, 14, 15, 16, 17, 18, 19, 20, 21, 22, 23, 24, 25, 26, 27, 28, 29, 30, 31, 32, 33, 34, 35 amino acid position(s) having a value greater than 0.5 in the Beta-turn profile of FIG. 9;

[0270] (XXIX) a peptide that occurs at least twice in Tables VIII-XXI and XXII to XLIX, collectively;

[0271] (XXX) a peptide that occurs at least three times in Tables VIII-XXI and XXII to XLIX, collectively;

[0272] (XXXI) a peptide that occurs at least four times in Tables VIII-XXI and XXII to XLIX, collectively;

[0273] (XXXII) a peptide that occurs at least five times in Tables VIII-XXI and XXII to XLIX, collectively;

[0274] (XXXIII) a peptide that occurs at least once in Tables VIII-XXI, and at least once in tables XXII to XLIX;

[0275] (XXXIV) a peptide that occurs at least once in Tables VIII-XXI, and at least twice in tables XXII to XLIX;

[0276] (XXXV) a peptide that occurs at least twice in Tables VIII-XXI, and at least once in tables XXII to XLIX;

[0277] (XXXVI) a peptide that occurs at least twice in Tables VIII-XXI, and at least twice in tables XXII to XLIX;

[0278] (XXXVII) a peptide which comprises one two, three, four, or five of the following characteristics, or an oligonucleotide encoding such peptide:
[0279] i) a region of at least 5 amino acids of a particular peptide of FIG. 3, in any whole number increment up to the full length of that protein in FIG. 3, that includes an amino acid position having a value equal to or greater than 0.5, 0.6, 0.7, 0.8, 0.9, or having a value equal to 1.0, in the Hydrophilicity profile of FIG. 5;
[0280] ii) a region of at least 5 amino acids of a particular peptide of FIG. 3, in any whole number increment up to the full length of that protein in FIG. 3, that includes an amino acid position having a value equal to or less than 0.5, 0.4, 0.3, 0.2, 0.1, or having a value equal to 0.0, in the Hydropathicity profile of FIG. 6;
[0281] iii) a region of at least 5 amino acids of a particular peptide of FIG. 3, in any whole number increment up to the full length of that protein in FIG. 3, that includes an amino acid position having a value equal to or greater than 0.5, 0.6, 0.7, 0.8, 0.9, or having a value equal to 1.0, in the Percent Accessible Residues profile of FIG. 7;
[0282] iv) a region of at least 5 amino acids of a particular peptide of FIG. 3, in any whole number increment up to the full length of that protein in FIG. 3, that includes an amino acid position having a value equal to or greater than 0.5, 0.6, 0.7, 0.8, 0.9, or having a value equal to 1.0, in the Average Flexibility profile of FIG. 8; or,
[0283] v) a region of at least 5 amino acids of a particular peptide of FIG. 3, in any whole number increment up to the full length of that protein in FIG. 3, that includes an amino acid position having a value equal to or greater than 0.5, 0.6, 0.7, 0.8, 0.9, or having a value equal to 1.0, in the Beta-turn profile of FIG. 9;

[0284] (XXXVIII) a composition comprising a peptide of (I)-(XXXVII) or an antibody or binding region thereof together with a pharmaceutical excipient and/or in a human unit dose form;

[0285] (XXXIX) a method of using a peptide of (I)-(XXXVII), or an antibody or binding region thereof or a composition of (XXXVIII) in a method to modulate a cell expressing PSCA;

[0286] (XL) a method of using a peptide of (I)-(XXXVII) or an antibody or binding region thereof or a composition of (XXXVIII) in a method to diagnose, prophylax, prognose, or treat an individual who bears a cell expressing PSCA;

[0287] (XLI) a method of using a peptide of (I)-(XXXVII) or an antibody or binding region thereof or a composition (XXXVIII) in a method to diagnose, prophylax, prognose, or treat an individual who bears a cell expressing PSCA, said cell from a cancer of a tissue listed in Table I;

[0288] (XLII) a method of using a peptide of (I)-(XXXVII) or an antibody or binding region thereof or a composition of (XXXVIII) in a method to diagnose, prophylax, prognose, or treat a a cancer;

[0289] (XLIII) a method of using a peptide of (I)-(XXXVII) or an antibody or binding region thereof or a composition of (XXXVIII) in a method to diagnose, prophylax, prognose, or treat a a cancer of a tissue listed in Table l; and;

[0290] (XLIV) a method of using a a peptide of (I)-(XXXVII) or an antibody or binding region thereof or a composition (XXXVIII) in a method to identify or characterize a modulator of a cell expressing PSCA.

[0291] As used herein, a range is understood to specifically disclose all whole unit positions thereof.

[0292] Typical embodiments of the invention disclosed herein include PSCA polynucleotides that encode specific portions of PSCA mRNA sequences (and those which are complementary to such sequences) such as those that encode the proteins and/or fragments thereof, for example:

[0293] (a) 4, 5, 6, 7, 8, 9, 10, 11, 12, 13, 14, 15, 16, 17, 18, 19, 20, 21, 22, 23, 24, 25, 30, 35, 40, 45, 50, 55, 60, 65, 70, 75, 80, 85, 90, 95, 100, 105, 110, 115, 120, and 123 or more contiguous amino acids of PSCA variant 1; the maximal lengths relevant for other variants are: variant 3, 94 amino acids; variant 4, 189 amino acids, variant 6, 114 amino acids, variant 19, 189 amino acids, variant 20, 189 amino acids, variant 21, 189 amino acids, variant 22, 189 amino acids, variant 24, 189 amino acids, variant 25, 189 amino acids, variant 26, 189 amino acids, and variant 27, 189 amino acids.

[0294] In general, naturally occurring allelic variants of human PSCA share a high degree of structural identity and homology (e.g., 90% or more homology). Typically, allelic variants of a PSCA protein contain conservative amino acid substitutions within the PSCA sequences described herein or contain a substitution of an amino acid from a corresponding position in a homologue of PSCA. One class of PSCA allelic variants are proteins that share a high degree of homology with at least a small region of a particular PSCA amino acid sequence, but further contain a radical departure from the sequence, such as a non-conservative substitution, truncation, insertion or frame shift. In comparisons of protein sequences, the terms, similarity, identity, and homology each have a distinct meaning as appreciated in the field of genetics. Moreover, orthology and paralogy can be important concepts describing the relationship of members of a given protein family in one organism to the members of the same family in other organisms.

[0295] Amino acid abbreviations are provided in Table II. Conservative amino acid substitutions can frequently be made in a protein without altering either the conformation or the function of the protein. Proteins of the invention can comprise 1, 2, 3, 4, 5, 6, 7, 8, 9, 10, 11, 12, 13, 14, 15 conservative substitutions. Such changes include substituting any of isoleucine (I), valine (V), and leucine (L) for any other of these hydrophobic amino acids; aspartic acid (D) for glutamic acid (E) and vice versa; glutamine (Q) for asparagine (N) and vice versa; and serine (S) for threonine (T) and vice versa. Other substitutions can also be considered conservative, depending on the environment of the particular amino acid and its role in the three-dimensional structure of the protein. For example, glycine (G) and alanine (A) can frequently be interchangeable, as can alanine (A) and valine (V). Methionine (M), which is relatively hydrophobic, can frequently be interchanged with leucine and isoleucine, and sometimes with valine. Lysine (K) and arginine (R) are frequently interchangeable in locations in which the significant feature of the amino acid residue is its charge and the differing pK's of these two amino acid residues are not significant. Still other changes can be considered “conservative” in particular environments (see, e.g. Table III herein; pages 13-15 “Biochemistry” 2^{nd} ED. Lubert Stryer ed (Stanford University); Henikoff et al., PNAS 1992 Vol 89 10915-10919; Lei et al., J Biol Chem May 19, 1995; 270(20):11882-6).

[0296] Embodiments of the invention disclosed herein include a wide variety of art-accepted variants or analogs of PSCA proteins such as polypeptides having amino acid insertions, deletions and substitutions. PSCA variants can be made using methods known in the art such as site-directed mutagenesis, alanine scanning, and PCR mutagenesis. Site-directed mutagenesis (Carter et al., Nucl. Acids Res., 13:4331 (1986); Zoller et al., Nucl. Acids Res., 10:6487 (1987)), cassette mutagenesis (Wells et al., Gene, 34:315 (1985)), restriction selection mutagenesis (Wells et al, Philos. Trans. R. Soc. London SerA, 317:415 (1986)) or other known techniques can be performed on the cloned DNA to produce the PSCA variant DNA.

[0297] Scanning amino acid analysis can also be employed to identify one or more amino acids along a contiguous sequence that is involved in a specific biological activity such as a protein-protein interaction. Among the preferred scanning amino acids are relatively small, neutral amino acids. Such amino acids include alanine, glycine, serine, and cysteine. Alanine is typically a preferred scanning amino acid among this group because it eliminates the side-chain beyond the beta-carbon and is less likely to alter the main-chain conformation of the variant. Alanine is also typically preferred because it is the most common amino acid. Further, it is frequently found in both buried and exposed positions (Creighton, The Proteins, (W. H. Freeman & Co., N.Y.); Chothia, J. Mol. Biol., 150:1 (1976)). If alanine substitution does not yield adequate amounts of variant, an isosteric amino acid can be used.

[0298] As defined herein, PSCA variants, analogs or homologs, have the distinguishing attribute of having at least one epitope that is “cross reactive” with a PSCA protein having an amino acid sequence of FIG. 3. As used in this sentence, “cross reactive” means that an antibody or T cell that specifically binds to a PSCA variant also specifically binds to a PSCA protein having an amino acid sequence set forth in FIG. 3. A polypeptide ceases to be a variant of a protein shown in FIG. 3, when it no longer contains any epitope capable of being recognized by an antibody or T cell that specifically binds to the starting PSCA protein. Those skilled in the art understand that antibodies that recognize proteins bind to epitopes of varying size, and a grouping of the order of about four or five amino acids, contiguous or not, is regarded as a typical number of amino acids in a minimal epitope. See, e.g., Nair et al., J. Immunol 2000 165(12): 6949-6955; Hebbes et al., Mol Immunol (1989) 26(9):865-73; Schwartz et al., J Immunol (1985) 135(4):2598-608.

[0299] Other classes of PSCA-related protein variants share 70%, 75%, 80%, 85% or 90% or more similarity with an amino acid sequence of FIG. 3, or a fragment thereof. Another specific class of PSCA protein variants or analogs comprises one or more of the PSCA biological motifs described herein or presently known in the art. Thus, encompassed by the present invention are analogs of PSCA fragments (nucleic or amino acid) that have altered functional (e.g. immunogenic) properties relative to the starting fragment. It is to be appreciated that motifs now or which become part of the art are to be applied to the nucleic or amino acid sequences of FIG. 2 or FIG. 3.

[0300] As discussed herein, embodiments of the claimed invention include polypeptides containing less than the full amino acid sequence of a PSCA protein shown in FIG. 2 or FIG. 3. For example, representative embodiments of the invention comprise peptides/proteins having any 4, 5, 6, 7, 8, 9, 10, 11, 12, 13, 14, 15 or more contiguous amino acids of a PSCA protein shown in FIG. 2 or FIG. 3.

[0301] Moreover, representative embodiments of the invention disclosed herein include polypeptides consisting of about amino acid 1 to about amino acid 10 of a PSCA protein shown in FIG. 2 or FIG. 3, polypeptides consisting of about amino acid 10 to about amino acid 20 of a PSCA protein shown in FIG. 2 or FIG. 3, polypeptides consisting of about amino acid 20 to about amino acid 30 of a PSCA protein shown in FIG. 2 or FIG. 3, polypeptides consisting of about amino acid 30 to about amino acid 40 of a PSCA protein shown in FIG. 2 or FIG. 3, polypeptides consisting of about amino acid 40 to about amino acid 50 of a PSCA protein shown in FIG. 2 or FIG. 3, polypeptides consisting of about amino acid 50 to about amino acid 60 of a PSCA protein shown in FIG. 2 or FIG. 3, polypeptides consisting of about amino acid 60 to about amino acid 70 of a PSCA protein shown in FIG. 2 or FIG. 3, polypeptides consisting of about amino acid 70 to about amino acid 80 of a PSCA protein shown in FIG. 2 or FIG. 3, polypeptides consisting of about amino acid 80 to about amino acid 90 of a PSCA protein shown in FIG. 2 or FIG. 3, polypeptides consisting of about amino acid 90 to about amino acid 100 of a PSCA protein shown in FIG. 2 or FIG. 3, etc. throughout the entirety of a PSCA amino acid sequence. Moreover, polypeptides consisting of about amino acid 1 (or 20 or 30 or 40 etc.) to about amino acid 20, (or 130, or 140 or 150 etc.) of a PSCA protein shown in FIG. 2 or FIG. 3 are embodiments of the invention. It is to be appreciated that the starting and stopping positions in this paragraph refer to the specified position as well as that position plus or minus 5 residues.

[0302] PSCA-related proteins are generated using standard peptide synthesis technology or using chemical cleavage methods well known in the art. Alternatively, recombinant methods can be used to generate nucleic acid molecules that encode a PSCA-related protein. In one embodiment, nucleic acid molecules provide a means to generate defined fragments of a PSCA protein (or variants, homologs or analogs thereof).

[0303] III.A.) Motif-Bearing Protein Embodiments

[0304] Additional illustrative embodiments of the invention disclosed herein include PSCA polypeptides comprising the amino acid residues of one or more of the biological motifs contained within a PSCA polypeptide sequence set forth in FIG. 2 or FIG. 3. Various motifs are known in the art, and a protein can be evaluated for the presence of such motifs by a number of publicly available Internet sites (see, e.g., URL addresses: pfam.wustl.edu/; searchlauncher.bcm.tmc.edu/seq-search/struc-predict.html; psort.ims.u-tokyo.ac.jp/; cbs.dtu.dk/; ebi.ac.uk/interpro/scan.html; expasy.ch/tools/scnpsit1.html; Epimabix™ and Epimer™, Brown University, brown.edu/ResearchrTB-HIV_Lab/epimatrixtepimatrix.html; and BIMAS, bimas.dcrt.nih.gov/.).

[0305] Motif bearing subsequences of all PSCA variant proteins are set forth and identified in Tables VIII-XXI and XXII-XLIX.

[0306] Table V sets forth several frequently occurring motifs based on pfam searches (see URL address pfam.wustl.edu/). The columns of Table V list (1) motif name abbreviation, (2) percent identity found amongst the different member of the motif family, (3) motif name or description and (4) most common function; location information is included if the motif is relevant for location.

[0307] Polypeptides comprising one or more of the PSCA motifs discussed above are useful in elucidating the specific characteristics of a malignant phenotype in view of the observation that the PSCA motifs discussed above are associated with growth dysregulation and because PSCA is overexpressed in certain cancers (See, e.g., Table I). Casein kinase II, cAMP and camp-dependent protein kinase, and Protein Kinase C, for example, are enzymes known to be associated with the development of the malignant phenotype (see e.g. Chen et al., Lab Invest., 78(2): 165-174 (1998); Gaiddon et al., Endocrinology 136(10): 4331-4338 (1995); Hall et al., Nucleic Acids Research 24(6): 1119-1126 (1996); Peterziel et al., Oncogene 18(46): 6322-6329 (1999) and O'Brian, Oncol. Rep. 5(2): 305-309 (1998)). Moreover, both glycosylation and myristoylation are protein modifications also associated with cancer and cancer progression (see e.g. Dennis et al., Biochem. Biophys. Acta 1473(1):21-34 (1999); Raju et al., Exp. Cell Res. 235(1): 145-154 (1997)). Amidation is another protein modification also associated with cancer and cancer progression (see e.g. Treston et al., J. Natl. Cancer Inst. Monogr. (13): 169-175 (1992)).

[0308] In another embodiment, proteins of the invention comprise one or more of the immunoreactive epitopes identified in accordance with art-accepted methods, such as the peptides set forth in Tables VIII-XXI and XXII-XLIX. CTL epitopes can be determined using specific algorithms to identify peptides within a PSCA protein that are capable of optimally binding to specified HLA alleles (e.g., Table IV; Epimatrix™ and Epimer™, Brown University, URL brown.edu/Research/TB-HIV_Lab/epimatrix/epimabtix.html; and BIMAS, URL bimas.dcrt.nih.gov/.) Moreover, processes for identifying peptides that have sufficient binding affinity for HLA molecules and which are correlated with being immunogenic epitopes, are well known in the art, and are carried out without undue experimentation. In addition, processes for identifying peptides that are immunogenic epitopes, are well known in the art, and are carried out without undue experimentation either in vitro or in vivo.

[0309] Also known in the art are principles for creating analogs of such epitopes in order to modulate immunogenicity. For example, one begins with an epitope that bears a CTL or HTL motif (see, e.g., the HLA Class I and HLA Class II motifs/supermotifs of Table IV). The epitope is analoged by substituting out an amino acid at one of the specified positions, and replacing it with another amino acid specified for that position. For example, on the basis of residues defined in Table IV, one can substitute out a deleterious residue in favor of any other residue, such as a preferred residue; substitute a less-preferred residue with a preferred residue; or substitute an originally-occurring preferred residue with another preferred residue. Substitutions can occur at primary anchor positions or at other positions in a peptide; see, e.g., Table IV.

[0310] A variety of references reflect the art regarding the identification and generation of epitopes in a protein of interest as well as analogs thereof. See, for example, WO 97/33602 to Chesnut et al.; Sette, Immunogenetics 1999 50(3-4): 201-212; Sette et al., J. Immunol. 2001 166(2): 1389-1397; Sidney et al., Hum. Immunol. 1997 58(1): 12-20; Kondo et al., Immunogenetics 1997 45(4): 249-258; Sidney et al., J. Immunol. 1996 157(8): 3480-90; and Falk et al., Nature 351: 290-6 (1991); Hunt et al., Science 255:1261-3 (1992); Parker et al., J. Immunol. 149:3580-7 (1992); Parker et al., J. Immunol. 152:163-75 (1994)); Kast et al., 1994 152(8): 3904-12; Borras-Cuesta et al, Hum. Immunol. 2000 61(3): 266-278; Alexander et al., J. Immunol. 2000 164(3); 164(3): 1625-1633; Alexander et al., PMID: 7895164, UI: 95202582; O'Sullivan et al., J. Immunol. 1991 147(8): 2663-2669; Alexander et al., Immunity 1994 1(9): 751-761 and Alexander et al., Immunol. Res. 1998 18(2): 79-92.

[0311] Related embodiments of the invention include polypeptides comprising combinations of the different motifs set forth in Table VI, and/or, one or more of the predicted CTL epitopes of Tables VIII-XXI and XXII-XLIX, and/or, one or more of the predicted HTL epitopes of Tables XLVI-XLIX, and/or, one or more of the T cell binding motifs known in the art. Preferred embodiments contain no insertions, deletions or substitutions either within the motifs or within the intervening sequences of the polypeptides. In addition, embodiments which include a number of either N-terminal and/or C-terminal amino acid residues on either side of these motifs may be desirable (to, for example, include a greater portion of the polypeptide architecture in which the motif is located). Typically, the number of N-terminal and/or C-terminal amino acid residues on either side of a motif is between about 1 to about 100 amino acid residues, preferably 5 to about 50 amino acid residues.

[0312] PSCA-related proteins are embodied in many forms, preferably in isolated form. A purified PSCA protein molecule will be substantially free of other proteins or molecules that impair the binding of PSCA to antibody, T cell or other ligand. The nature and degree of isolation and purification will depend on the intended use. Embodiments of a PSCA-related proteins include purified PSCA-related proteins and functional, soluble PSCA-related proteins. In one embodiment, a functional, soluble PSCA protein or fragment thereof retains the ability to be bound by antibody, T cell or other ligand.

[0313] The invention also provides PSCA proteins comprising biologically active fragments of a PSCA amino acid sequence shown in FIG. 2 or FIG. 3. Such proteins exhibit properties of the starting PSCA protein, such as the ability to elicit the generation of antibodies that specifically bind an epitope associated with the starting PSCA protein; to be bound by such antibodies; to elicit the activation of HTL or CTL; and/or, to be recognized by HTL or CTL that also specifically bind to the starting protein.

[0314] PSCA-related polypeptides that contain particulary interesting structures can be predicted and/or identified using various analytical techniques well known in the art, including, for example, the methods of Chou-Fasman, Garnier-Robson, Kyte-Doolittle, Eisenberg, Karplus-Schultz or Jameson-Wolf analysis, or based on immunogenicity. Fragments that contain such structures are particularly useful in generating subunit-specific anti-PSCA antibodies or T cells or in identifying cellular factors that bind to PSCA. For example, hydrophilicity profiles can be generated, and immunogenic peptide fragments identified, using the method of Hopp, T. P. and Woods, K. R., 1981, Proc. Natl. Acad. Sci. U.S.A. 78:3824-3828. Hydropathicity profiles can be generated, and immunogenic peptide fragments identified, using the method of Kyte, J. and Doolittle, R. F., 1982, J. Mol. Biol. 157:105-132. Percent (%) Accessible Residues profiles can be generated, and immunogenic peptide fragments identified, using the method of Janin J., 1979, Nature 277:491-492. Average Flexibility profiles can be generated, and immunogenic peptide fragments identified, using the method of Bhaskaran R., Ponnuswamy P. K., 1988, Int. J. Pept. Protein Res. 32:242-255. Beta-turn profiles can be generated, and immunogenic peptide fragments identified, using the method of Deleage, G., Roux B., 1987, Protein Engineering 1:289-294.

[0315] CTL epitopes can be determined using specific algorithms to identify peptides within a PSCA protein that are capable of optimally binding to specified HLA alleles (e.g., by using the SYFPEITHI site at World Wide Web URL syfpeithi.bmi-heidelberg.com/; the listings in Table IV(A)-(E); Epimatrix™ and Epimer™, Brown University, URL (brown.edu/Research/TB-HIV_Lab/epimatrix/epimatrix.html); and BIMAS, URL bimas.dcrt.nih.gov/). Illustrating this, peptide epitopes from PSCA that are presented in the context of human MHC Class I molecules, e.g., HLA-A1, A2, A3, A11, A24, B7 and B35 were predicted (see, e.g., Tables VIII-XXI, XXII-XLIX). Specifically, the complete amino acid sequence of the PSCA protein and relevant portions of other variants, i.e., for HLA Class I predictions 9 flanking residues on either side of a point mutation or exon juction, and for HLA Class II predictions 14 flanking residues on either side of a point mutation or exon junction corresponding to that variant, were entered into the HLA Peptide Motif Search algorithm found in the Bioinformatics and Molecular Analysis Section (BIMAS) web site listed above; in addition to the site SYFPEITHI, at URL syfpeithi.bmi-heidelberg.com/.

[0316] The HLA peptide motif search algorithm was developed by Dr. Ken Parker based on binding of specific peptide sequences in the groove of HLA Class I molecules, in particular HLA-A2 (see, e.g., Falk et al., Nature 351: 290-6 (1991); Hunt et al., Science 255:1261-3 (1992); Parker et al., J. Immunol. 149:3580-7 (1992); Parker et al., J. Immunol. 152:163-75 (1994)). This algorithm allows location and ranking of 8-mer, 9-mer, and 10-mer peptides from a complete protein sequence for predicted binding to HLA-A2 as well as numerous other HLA Class I molecules. Many HLA class I binding peptides are 8-, 9-, 10 or 11-mers. For example, for Class I HLA-A2, the epitopes preferably contain a leucine (L) or methionine (M) at position 2 and a valine (V) or leucine (L) at the C-terminus (see, e.g., Parker et al., J. Immunol. 149:3580-7 (1992)). Selected results of PSCA predicted binding peptides are shown in Tables VIII-XXI and XXII-XLIX herein. In Tables VIII-XXI and XXII-XLVII, selected candidates, 9-mers and 10-mers, for each family member are shown along with their location, the amino acid sequence of each specific peptide, and an estimated binding score. In Tables XLVI-XLIX, selected candidates, 15-mers, for each family member are shown along with their location, the amino acid sequence of each specific peptide, and an estimated binding score. The binding score corresponds to the estimated half time of dissociation of complexes containing the peptide at 37° C. at pH 6.5. Peptides with the highest binding score are predicted to be the most tightly bound to HLA Class I on the cell surface for the greatest period of time and thus represent the best immunogenic targets for T-cell recognition.

[0317] Actual binding of peptides to an HLA allele can be evaluated by stabilization of HLA expression on the antigen-processing defective cell line T2 (see, e.g., Xue et al., Prostate 30:73-8 (1997) and Peshwa et al., Prostate 36:129-38 (1998)). Immunogenicity of specific peptides can be evaluated in vitro by stimulation of CD8+ cytotoxic T lymphocytes (CTL) in the presence of antigen presenting cells such as dendritic cells.

[0318] It is to be appreciated that every epitope predicted by the BIMAS site, Epimer™ and Epimatrix™ sites, or specified by the HLA class I or class II motifs available in the art or which become part of the art such as set forth in Table IV (or determined using World Wide Web site URL syfpeithi.bmi-heidelberg.com/, or BIMAS, bimas.dcrt.nih.govi) are to be “applied” to a PSCA protein in accordance with the invention. As used in this context “applied” means that a PSCA protein is evaluated, e.g., visually or by computer-based patterns finding methods, as appreciated by those of skill in the relevant art. Every subsequence of a PSCA protein of 8, 9, 10, or 11 amino acid residues that bears an HLA Class I motif, or a subsequence of 9 or more amino acid residues that bear an HLA Class II motif are within the scope of the invention.

[0319] III.B.) Expression of PSCA-Related Proteins

[0320] In an embodiment described in the examples that follow, PSCA can be conveniently expressed in cells (such as 293T cells) transfected with a commercially available expression vector such as a CMV-driven expression vector encoding PSCA with a C-terminal 6× His and MYC tag (pcDNA3.1/mycHIS, Invitrogen or Tag5, GenHunter Corporation, Nashville Tenn.). The Tag5 vector provides an IgGK secretion signal that can be used to facilitate the production of a secreted PSCA protein in transfected cells. The secreted HIS-tagged PSCA in the culture media can be purified, e.g., using a nickel column using standard techniques.

[0321] III.C.) Modifications of PSCA-Related Proteins

[0322] Modifications of PSCA-related proteins such as covalent modifications are included within the scope of this invention. One type of covalent modification includes reacting targeted amino acid residues of a PSCA polypeptide with an organic derivatizing agent that is capable of reacting with selected side chains or the N— or C-terminal residues of a PSCA protein. Another type of covalent modification of a PSCA polypeptide included within the scope of this invention comprises altering the native glycosylation pattern of a protein of the invention. Another type of covalent modification of PSCA comprises linking a PSCA polypeptide to one of a variety of nonproteinaceous polymers, e.g., polyethylene glycol (PEG), polypropylene glycol, or polyoxyalkylenes, in the manner set forth in U.S. Pat. Nos. 4,640,835; 4,496,689; 4,301,144; 4,670,417; 4,791,192 or 4,179,337.

[0323] The PSCA-related proteins of the present invention can also be modified to form a chimeric molecule comprising PSCA fused to another, heterologous polypeptide or amino acid sequence. Such a chimeric molecule can be synthesized chemically or recombinantly. A chimeric molecule can have a protein of the invention fused to another tumor-associated antigen or fragment thereof. Alternatively, a protein in accordance with the invention can comprise a fusion of fragments of a PSCA sequence (amino or nucleic acid) such that a molecule is created that is not, through its length, directly homologous to the amino or nucleic acid sequences shown in FIG. 2 or FIG. 3. Such a chimeric molecule can comprise multiples of the same subsequence of PSCA. A chimeric molecule can comprise a fusion of a PSCA-related protein with a polyhistidine epitope tag, which provides an epitope to which immobilized nickel can selectively bind, with cytokines or with growth factors. The epitope tag is generally placed at the amino- or carboxyl-terminus of a PSCA protein. In an alternative embodiment, the chimeric molecule can comprise a fusion of a PSCA-related protein with an immunoglobulin or a particular region of an immunoglobulin. For a bivalent form of the chimeric molecule (also referred to as an “immunoadhesin”), such a fusion could be to the Fc region of an IgG molecule. The Ig fusions preferably include the substitution of a soluble (transmembrane domain deleted or inactivated) form of a PSCA polypeptide in place of at least one variable region within an Ig molecule. In a preferred embodiment, the immunoglobulin fusion includes the hinge, CH2 and CH3, or the hinge, CHI, CH2 and CH3 regions of an IgGl molecule. For the production fusions see, e.g., U.S. Pat. No. 5,428,130 issued Jun. 27, 1995.

[0324] III.D.) Uses of PSCA-Related Proteins

[0325] The proteins of the invention have a number of different specific uses. As PSCA is highly expressed in prostate and other cancers, PSCA-related proteins are used in methods that assess the status of PSCA gene products in normal versus cancerous tissues, thereby elucidating the malignant phenotype. Typically, polypeptides from specific regions of a PSCA protein are used to assess the presence of perturbations (such as deletions, insertions, point mutations etc.) in those regions (such as regions containing one or more motifs). Exemplary assays utilize antibodies or T cells targeting PSCA-related proteins comprising the amino acid residues of one or more of the biological motifs contained within a PSCA polypeptide sequence in order to evaluate the characteristics of this region in normal versus cancerous tissues or to elicit an immune response to the epitope. Alternatively, PSCA-related proteins that contain the amino acid residues of one or more of the biological motifs in a PSCA protein are used to screen for factors that interact with that region of PSCA.

[0326] PSCA protein fragments/subsequences are particularly useful in generating and characterizing domain-specific antibodies (e.g., antibodies recognizing an extracellular or intracellular epitope of a PSCA protein), for identifying agents or cellular factors that bind to PSCA or a particular structural domain thereof, and in various therapeutic and diagnostic contexts, including but not limited to diagnostic assays, cancer vaccines and methods of preparing such vaccines.

[0327] Proteins encoded by the PSCA genes, or by analogs, homologs or fragments thereof, have a variety of uses, including but not limited to generating antibodies and in methods for identifying ligands and other agents and cellular constituents that bind to a PSCA gene product. Antibodies raised against a PSCA protein or fragment thereof are useful in diagnostic and prognostic assays, and imaging methodologies in the management of human cancers characterized by expression of PSCA protein, such as those listed in Table I. Such antibodies can be expressed intracellularly and used in methods of treating patients with such cancers. PSCA-related nucleic acids or proteins are also used in generating HTL or CTL responses.

[0328] Various immunological assays useful for the detection of PSCA proteins are used, including but not limited to various types of radioimmunoassays, enzyme-linked immunosorbent assays (ELISA), enzyme-linked immunofluorescent assays (ELIFA), immunocytochemical methods, and the like. Antibodies can be labeled and used as immunological imaging reagents capable of detecting PSCA-expressing cells (e.g., in radioscintigraphic imaging methods). PSCA proteins are also particularly useful in generating cancer vaccines, as further described herein.

[0329] IV.) PSCA Antibodies

[0330] Another aspect of the invention provides antibodies that bind to PSCA-related proteins. Preferred antibodies specifically bind to a PSCA-related protein and do not bind (or bind weakly) to peptides or proteins that are not PSCA-related proteins under physiological conditions. In this context, examples of physiological conditions include: 1) phosphate buffered saline; 2) Tris-buffered saline containing 25 mM Tris and 150 mM NaCl; or normal saline (0.9% NaCl); 4) animal serum such as human serum; or, 5) a combination of any of 1) through 4); these reactions preferably taking place at pH 7.5, alternatively in a range of pH 7.0 to 8.0, or alternatively in a range of pH 6.5 to 8.5; also, these reactions taking place at a temperature between 4° C. to 37° C. For example, antibodies that bind PSCA can bind PSCA-related proteins such as the homologs or analogs thereof.

[0331] PSCA antibodies of the invention are particularly useful in cancer (see, e.g., Table I) diagnostic and prognostic assays, and imaging methodologies. Similarly, such antibodies are useful in the treatment, diagnosis, and/or prognosis of other cancers, to the extent PSCA is also expressed or overexpressed in these other cancers. Moreover, intracellularly expressed antibodies (e.g., single chain antibodies) are therapeutically useful in treating cancers in which the expression of PSCA is involved, such as advanced or metastatic prostate cancers.

[0332] The invention also provides various immunological assays useful for the detection and quantficaton of PSCA and mutant PSCA-related proteins. Such assays can comprise one or more PSCA antibodies capable of recognizing and binding a PSCA-related protein, as appropriate. These assays are performed within various immunological assay formats well known in the art, including but not limited to various types of radioimmunoassays, enzyme-linked immunosorbent assays (ELISA), enzyme-linked immunofluorescent assays (ELIFA), and the like.

[0333] Immunological non-antibody assays of the invention also comprise T cell immunogenicity assays (inhibitory or stimulatory) as well as major histocompatibility complex (MHC) binding assays.

[0334] In addition, immunological imaging methods capable of detecting prostate cancer and other cancers expressing PSCA are also provided by the invention, including but not limited to radioscintigraphic imaging methods using labeled PSCA antibodies. Such assays are clinically useful in the detection, monitoring, and prognosis of PSCA expressing cancers such as prostate cancer.

[0335] PSCA antibodies are also used in methods for purifying a PSCA-related protein and for isolating PSCA homologues and related molecules. For example, a method of purifying a PSCA-related protein comprises incubating a PSCA antibody, which has been coupled to a solid matrix, with a lysate or other solution containing a PSCA-related protein under conditions that permit the PSCA antibody to bind to the PSCA-related protein; washing the solid matrix to eliminate impurities; and eluting the PSCA-related protein from the coupled antibody. Other uses of PSCA antibodies in accordance with the invention include generating anti-idiotypic antibodies that mimic a PSCA protein.

[0336] Various methods for the preparation of antibodies are well known in the art. For example, antibodies can be prepared by immunizing a suitable mammalian host using a PSCA-related protein, peptide, or fragment, in isolated or immunoconjugated form (Antibodies: A Laboratory Manual, CSH Press, Eds., Harlow, and Lane (1988); Harlow, Antibodies, Cold Spring Harbor Press, NY (1989)). In addition, fusion proteins of PSCA can also be used, such as a PSCA GST-fusion protein. In a particular embodiment, a GST fusion protein comprising all or most of the amino acid sequence of FIG. 2 or FIG. 3 is produced, then used as an immunogen to generate appropriate antibodies. In another embodiment, a PSCA-related protein is synthesized and used as an immunogen.

[0337] In addition, naked DNA immunization techniques known in the art are used (with or without purified PSCA-related protein or PSCA expressing cells) to generate an immune response to the encoded immunogen (for review, see Donnelly et al., 1997, Ann. Rev. Immunol. 15: 617-648).

[0338] The amino acid sequence of a PSCA protein as shown in FIG. 2 or FIG. 3 can be analyzed to select specific regions of the PSCA protein for generating antibodies. For example, hydrophobicity and hydrophilicity analyses of a PSCA amino acid sequence are used to identify hydrophilic regions in the PSCA structure. Regions of a PSCA protein that show immunogenic structure, as well as other regions and domains, can readily be identified using various other methods known in the art, such as Chou-Fasman, Garnier-Robson, Kyte-Doolittie, Eisenberg, Karplus-Schultz or Jameson-Wolf analysis. Hydrophilicity profiles can be generated using the method of Hopp, T. P. and Woods, K. R., 1981, Proc. Natl. Acad. Sci. U.S.A. 78:3824-3828. Hydropathicity profiles can be generated using the method of Kyte, J. and Doolittle, R. F., 1982, J. Mol. Biol. 157:105-132. Percent (%) Accessible Residues profiles can be generated using the method of Janin J., 1979, Nature 277:491-492. Average Flexibility profiles can be generated using the method of Bhaskaran R., Ponnuswamy P. K., 1988, Int. J. Pept. Protein Res. 32:242-255. Beta-turn profiles can be generated using the method of Deleage, G., Roux B., 1987, Protein Engineering 1:289-294. Thus, each region identified by any of these programs or methods is within the scope of the present invention. Methods for the generation of PSCA antibodies are further illustrated by way of the examples provided herein. Methods for preparing a protein or polypeptide for use as an immunogen are well known in the art. Also well known in the art are methods for preparing immunogenic conjugates of a protein with a carrier, such as BSA, KLH or other carrier protein. In some circumstances, direct conjugation using, for example, carbodiimide reagents are used; in other instances linking reagents such as those supplied by Pierce Chemical Co., Rockford, Ill., are effective. Administration of a PSCA immunogen is often conducted by injection over a suitable time period and with use of a suitable adjuvant, as is understood in the art. During the immunization schedule, titers of antibodies can be taken to determine adequacy of antibody formation.

[0339] PSCA monoclonal antibodies can be produced by various means well known in the art. For example, immortalized cell lines that secrete a desired monoclonal antibody are prepared using the standard hybridoma technology of Kohler and Milstein or modifications that immortalize antibody-producing B cells, as is generally known. Immortalized cell lines that secrete the desired antibodies are screened by immunoassay in which the antigen is a PSCA-related protein. When the appropriate immortalized cell culture is identified, the cells can be expanded and antibodies produced either from in vitro cultures or from ascites fluid.

[0340] The antibodies or fragments of the invention can also be produced, by recombinant means. Regions that bind specifically to the desired regions of a PSCA protein can also be produced in the context of chimeric or complementarity-determining region (CDR) grafted antibodies of multiple species origin. Humanized or human PSCA antibodies can also be produced, and are preferred for use in therapeutic contexts. Methods for humanizing murine and other non-human antibodies, by substituting one or more of the non-human antibody CDRs for corresponding human antibody sequences, are well known (see for example, Jones et al., 1986, Nature 321: 522-525; Riechmann et al, 1988, Nature 332: 323-327; Verhoeyen et al., 1988, Science 239: 1534-1536). See also, Carter et al., 1993, Proc. Natl. Acad. Sci. USA 89: 4285 and Sims et al., 1993, J. Immunol. 151: 2296.

[0341] Methods for producing fully human monoclonal antibodies include phage display and transgenic methods (for review, see Vaughan et al., 1998, Nature Biotechnology 16: 535-539). Fully human PSCA monoclonal antibodies can be generated using cloning technologies employing large human Ig gene combinatorial libraries (i.e., phage display) (Griffiths and Hoogenboom, Building an in vitro immune system: human antibodies from phage display libraries. In: Protein Engineering of Antibody Molecules for Prophylactic and Therapeutic Applications in Man, Clark, M. (Ed.), Nottingham Academic, pp 45-64 (1993); Burton and Barbas, Human Antibodies from combinatorial libraries. Id., pp 65-82). Fully human PSCA monoclonal antibodies can also be produced using transgenic mice engineered to contain human immunoglobulin gene loci as described in PCT Patent Application WO98/24893, Kucherlapati and Jakobovits et al., published Dec. 3, 1997 (see also, Jakobovits, 1998, Exp. Opin. Invest. Drugs 7(4): 607-614; U.S. Pat. No. 6,162,963 issued 19 Dec. 2000; U.S. Pat. No. 6,150,584 issued 12 Nov. 2000; and, U.S. Pat. No. 6,114,598 issued 5 Sep. 2000). This method avoids the in vitro manipulation required with phage display technology and efficiently produces high affinity authentic human antibodies.

[0342] Reactivity of PSCA antibodies with a PSCA-related protein can be established by a number of well known means, including Western blot, immunoprecipitation, ELISA, and FACS analyses using, as appropriate, PSCA-related proteins, PSCA-expressing cells or extracts thereof. A PSCA antibody or fragment thereof can be labeled with a detectable marker or conjugated to a second molecule. Suitable detectable markers include, but are not limited to, a radioisotope, a fluorescent compound, a bioluminescent compound, chemiluminescent compound, a metal chelator or an enzyme. Further, bi-specific antibodies specific for two or more PSCA epitopes are generated using methods generally known in the art. Homodimeric antibodies can also be generated by cross-linking techniques known in the art (e.g., Wolff et al., Cancer Res. 53: 2560-2565).

[0343] V.) PSCA Cellular Immune Responses

[0344] The mechanism by which T cells recognize antigens has been delineated. Efficacious peptide epitope vaccine compositions of the invention induce a therapeutic or prophylactic immune responses in very broad segments of the world-wide population. For an understanding of the value and efficacy of compositions of the invention that induce cellular immune responses, a brief review of immunology-related technology is provided.

[0345] A complex of an HLA molecule and a peptidic antigen acts as the ligand recognized by HLA-restricted T cells (Buus, S. et al., Cell 47:1071, 1986; Babbitt, B. P. et al., Nature 317:359, 1985; Townsend, A. and Bodmer, H., Annu. Rev. Immunol. 7:601, 1989; Germain, R. N., Annu. Rev. Immunol. 11:403, 1993). Through the study of single amino acid substituted antigen analogs and the sequencing of endogenously bound, naturally processed peptides, critical residues that correspond to motifs required for specific binding to HLA antigen molecules have been identified and are set forth in Table IV (see also, e.g., Southwood, et al., J. Immunol. 160:3363, 1998; Rammensee, et al., Immunogenetics 41:178, 1995; Rammensee et al., SYFPEITHI, access via World Wide Web at URL (134.2.96.221/scripts.hlaserver.dll/home.htm); Selte, A. and Sidney, J. Curr. Opin. Immunol. 10:478, 1998; Engelhard, V. H., Curr. Opin. Immunol. 6:13, 1994; Sette, A. and Grey, H. M., Curr. Opin. Immunol. 4:79, 1992; Sinigaglia, F. and Hammer, J. Curr. Biol.6:52, 1994; Ruppert et al., Cell 74:929-937, 1993; Kondo et al, J. Immunol. 155:4307-4312, 1995; Sidney et al., J. Immunol. 157:3480-3490, 1996; Sidney et al., Human Immunol. 45:79-93, 1996; Sette, A. and Sidney, J. Immunogenetics 1999 November; 50(3-4):201-12 Review).

[0346] Furthermore, x-ray crystallographic analyses of HLA-peptide complexes have revealed pockets within the peptide binding cleft/groove of HLA molecules which accommodate, in an allele-specific mode, residues borne by peptide ligands; these residues in turn determine the HLA binding capacity of the peptides in which they are present. (See, e.g., Madden, D. R. Annu. Rev. Immunol. 13:587, 1995; Smith, et al., Immunity 4:203, 1996; Fremont et al., Immunity 8:305, 1998; Stern et al., Structure 2:245, 1994; Jones, E. Y. Curr. Opin. Immunol 9:75, 1997; Brown, J. H. et al., Nature 364:33, 1993; Guo, H. C. et al., Proc. Natl. Acad. Sci. USA 90:8053, 1993; Guo, H. C. et al., Nature 360:364, 1992; Silver, M. L. et al., Nature 360:367, 1992; Matsumura, M. et al., Science 257:927, 1992; Madden et al., Cell 70:1035, 1992; Fremont, D. H. et al., Science 257:919, 1992; Saper, M. A., Bjorkman, P. J. and Wiley, D. C., J. Mol. Biol. 219:277, 1991.)

[0347] Accordingly, the definition of class I and class 11 allele-specific HLA binding motifs, or class I or class II supermotifs allows identification of regions within a protein that are correlated with binding to particular HLA antigen(s).

[0348] Thus, by a process of HLA motif identification, candidates for epitope-based vaccines have been identified; such candidates can be further evaluated by HLA-peptide binding assays to determine binding affinity and/or the time period of association of the epitope and its corresponding HLA molecule. Additional confirmatory work can be performed to select, amongst these vaccine candidates, epitopes with preferred characteristics in terms of population coverage, and/or immunogenicity.

[0349] Various strategies can be utilized to evaluate cellular immunogenicity, including:

[0350] 1) Evaluabon of primary T cell cultures from normal individuals (see, e.g., Wentworth, P. A. et al., Mol. Immunol 32:603, 1995; Celis, E. et al., Proc. Natl. Acad. Sci. USA 91:2105, 1994; Tsai, V. et al., J. Immunol. 158:1796, 1997; Kawashima, I. et al., Human Immunol. 59:1, 1998). This procedure involves the stimulation of peripheral blood lymphocytes (PBL) from normal subjects with a test peptide in the presence of antigen presenting cells in vitro over a period of several weeks. T cells specific for the peptide become activated during this time and are detected using, e.g., a lymphokine- or ⁵¹Cr-release assay involving peptide sensitized target cells.

[0351] 2) Immunization of HLA transgenic mice (see, e.g., Wentworth, P. A. et al., J. Immunol. 26:97, 1996; Wentworth, P. A. et al., Int. Immunol. 8:651, 1996; Alexander, J. et al., J. Immunol. 159:4753, 1997). For example, in such methods peptides in incomplete Freund's adjuvant are administered subcutaneously to HLA transgenic mice. Several weeks following immunization, splenocytes are removed and cultured in vitro in the presence of test peptide for approximately one week. Peptide-specific T cells are detected using, e.g., a ⁵¹Cr-release assay involving peptide sensitized target cells and target cells expressing endogenously generated antigen.

[0352] 3) Demonstration of recall T cell responses from immune individuals who have been either effectively vaccinated and/or from chronically ill patients (see, e.g., Rehermann, B. et al., J. Exp. Med. 181:1047, 1995; Doolan, D. L. et al., Immunity 7:97, 1997; Bertoni, R. et al., J. Clin. Invest. 100:503, 1997; Threlkeld, S. C. et al., J. Immunol. 159:1648, 1997; Diepolder, H. M. et al., J. Virol. 71:6011, 1997). Accordingly, recall responses are detected by culturing PBL from subjects that have been exposed to the antigen due to disease and thus have generated an immune response “naturally”, or from patients who were vaccinated against the antigen. PBL from subjects are cultured in vitro for 1-2 weeks in the presence of test peptide plus antigen presenting cells (APC) to allow activation of “memory” T cells, as compared to “naive” T cells. At the end of the culture period, T cell activity is detected using assays including ⁵¹Cr release involving peptide-sensitized targets, T cell proliferation, or lymphokine release.

[0353] VI.) PSCA Transgenic Animals

[0354] Nucleic acids that encode a PSCA-related protein can also be used to generate either transgenic animals or “knock out” animals that, in turn, are useful in the development and screening of therapeutically useful reagents. In accordance with established techniques, cDNA encoding PSCA can be used to clone genomic DNA that encodes PSCA. The cloned genomic sequences can then be used to generate transgenic animals containing cells that express DNA that encode PSCA. Methods for generating transgenic animals, particularly animals such as mice or rats, have become conventional in the art and are described, for example, in U.S. Pat. No. 4,736,866 issued 12 Apr. 1988, and U.S. Pat. No. 4,870,009 issued 26 Sep. 1989. Typically, particular cells would be targeted for PSCA transgene incorporation with tissue-specific enhancers.

[0355] Transgenic animals that include a copy of a transgene encoding PSCA can be used to examine the effect of increased expression of DNA that encodes PSCA. Such animals can be used as tester animals for reagents thought to confer protection from, for example, pathological conditions associated with its overexpression. In accordance with this aspect of the invention, an animal is treated with a reagent and a reduced incidence of a pathological condition, compared to untreated animals that bear the transgene, would indicate a potential therapeutic intervention for the pathological condition.

[0356] Alternatively, non-human homologues of PSCA can be used to construct a PSCA “knock our animal that has a defective or altered gene encoding PSCA as a result of homologous recombination between the endogenous gene encoding PSCA and altered genomic DNA encoding PSCA introduced into an embryonic cell of the animal. For example, cDNA that encodes PSCA can be used to clone genomic DNA encoding PSCA in accordance with established techniques. A portion of the genomic DNA encoding PSCA can be deleted or replaced with another gene, such as a gene encoding a selectable marker that can be used to monitor integration. Typically, several kilobases of unaltered flanking DNA (both at the 5′ and 3′ ends) are included in the vector (see, e.g., Thomas and Capecchi, Cell, 51:503 (1987) for a description of homologous recombination vectors). The vector is introduced into an embryonic stem cell line (e.g., by electroporation) and cells in which the introduced DNA has homologously recombined with the endogenous DNA are selected (see, e.g., Li et al., Cell, 69:915 (1992)). The selected cells are then injected into a blastocyst of an animal (e.g., a mouse or rat) to form aggregation chimeras (see, e.g., Bradley, in Teratocarcinomas and Embryonic Stem Cells: A Practical Approach, E. J. Robertson, ed. (IRL, Oxford, 1987), pp. 113-152). A chimeric embryo can then be implanted into a suitable pseudopregnant female foster animal, and the embryo brought to term to create a “knock out” animal. Progeny harboring the homologously recombined DNA in their germ cells can be identified by standard techniques and used to breed animals in which all cells of the animal contain the homologously recombined DNA. Knock out animals can be characterized, for example, for their ability to defend against certain pathological conditions or for their development of pathological conditions due to absence of a PSCA polypeptide.

[0357] VII.) Methods for the Detection of PSCA

[0358] Another aspect of the present invention relates to methods for detecting PSCA polynucleotides and PSCA-related proteins, as well as methods for identifying a cell that expresses PSCA. The expression profile of PSCA makes it a diagnostic marker for metastasized disease. Accordingly, the status of PSCA gene products provides information useful for predicting a variety of factors including susceptibility to advanced stage disease, rate of progression, and/or tumor aggressiveness. As discussed in detail herein, the status of PSCA gene products in patient samples can be analyzed by a variety protocols that are well known in the art including immunohistochemical analysis, the variety of Northern blotting techniques including in situ hybridization, RT-PCR analysis (for example on laser capture micro-dissected samples), Western blot analysis and tissue array analysis.

[0359] More particularly, the invention provides assays for the detection of PSCA polynucleotides in a biological sample, such as serum, bone, prostate, and other tissues, urine, semen, cell preparations, and the like. Detectable PSCA polynucleotides include, for example, a PSCA gene or fragment thereof, PSCA mRNA, alternative splice variant PSCA mRNAs, and recombinant DNA or RNA molecules that contain a PSCA polynucleotide. A number of methods for amplifying and/or detecting the presence of PSCA polynucleotides are well known in the art and can be employed in the practice of this aspect of the invention.

[0360] In one embodiment, a method for detecting a PSCA mRNA in a biological sample comprises producing cDNA from the sample by reverse transcription using at least one primer; amplifying the cDNA so produced using a PSCA polynucleotides as sense and antisense primers to amplify PSCA cDNAs therein; and detecting the presence of the amplified PSCA cDNA. Optionally, the sequence of the amplified PSCA cDNA can be determined.

[0361] In another embodiment, a method of detecting a PSCA gene in a biological sample comprises first isolating genomic DNA from the sample; amplifying the isolated genomic DNA using PSCA polynucleotides as sense and antisense primers; and detecting the presence of the amplified PSCA gene. Any number of appropriate sense and antisense probe combinations can be designed from a PSCA nucleotide sequence (see, e.g., FIG. 2) and used for this purpose.

[0362] The invention also provides assays for detecting the presence of a PSCA protein in a issue or other biological sample such as serum, semen, bone, prostate, urine, cell preparations, and the like. Methods for detecting a PSCA-related protein are also well known and include, for example, immunoprecipitation, immunohistochemical analysis, Western blot analysis, molecular binding assays, ELISA, ELIFA and the like. For example, a method of detecting the presence of a PSCA-related protein in a biological sample comprises first contacting the sample with a PSCA antibody, a PSCA-reactive fragment thereof, or a recombinant protein containing an antigen-binding region of a PSCA antibody; and then detecting the binding of PSCA-related protein in the sample.

[0363] Methods for identifying a cell that expresses PSCA are also within the scope of the invention. In one embodiment, an assay for identifying a cell that expresses a PSCA gene comprises detecting the presence of PSCA mRNA in the cell. Methods for the detection of particular mRNAs in cells are well known and include, for example, hybridization assays using complementary DNA probes (such as in situ hybridization using labeled PSCA riboprobes, Northern blot and related techniques) and various nucleic acid amplification assays (such as RT-PCR using complementary primers specific for PSCA, and other amplification type detection methods, such as, for example, branched DNA, SISBA, TMA and the like). Alternatively, an assay for identifying a cell that expresses a PSCA gene comprises detecting the presence of PSCA-related protein in the cell or secreted by the cell. Various methods for the detection of proteins are well known in the art and are employed for the detection of PSCA-related proteins and cells that express PSCA-related proteins.

[0364] PSCA expression analysis is also useful as a tool for identifying and evaluating agents that modulate PSCA gene expression. For example, PSCA expression is significantly upregulated in prostate cancer, and is expressed in cancers of the tissues listed in Table I. Identification of a molecule or biological agent that inhibits PSCA expression or over-expression in cancer cells is of therapeutic value. For example, such an agent can be identified by using a screen that quantifies PSCA expression by RT-PCR, nucleic acid hybridization or antibody binding.

[0365] VIII.) Methods for Monitoring the Status of PSCA-Related Genes and Their Products

[0366] Oncogenesis is known to be a multistep process where cellular growth becomes progressively dysregulated and cells progress from a normal physiological state to precancerous and then cancerous states (see, e.g., Alers et al., Lab Invest. 77(5): 437-438 (1-997) and Isaacs et al., Cancer Surv. 23: 19-32 (1995)). In this context, examining a biological sample for evidence of dysregulated cell growth (such as aberrant PSCA expression in cancers) allows for early detection of such aberrant physiology, before a pathologic state such as cancer has progressed to a stage that therapeutic options are more limited and or the prognosis is worse. In such examinations, the status of PSCA in a biological sample of interest can be compared, for example, to the status of PSCA in a corresponding normal sample (e.g. a sample from that individual or alternatively another individual that is not affected by a pathology). An alteration in the status of PSCA in the biological sample (as compared to the normal sample) provides evidence of dysregulated cellular growth. In addition to using a biological sample that is not affected by a pathology as a normal sample, one can also use a predetermined normative value such as a predetermined normal level of mRNA expression (see, e.g., Grever et al, J. Comp. Neurol. Dec. 9, 1996; 376(2): 306-14 and U.S. Pat. No. 5,837,501) to compare PSCA status in a sample.

[0367] The term “status” in this context is used according to its art accepted meaning and refers to the condition or state of a gene and its products. Typically, skilled artisans use a number of parameters to evaluate the condition or state of a gene and its products. These include, but are not limited to the location of expressed gene products (including the location of PSCA expressing cells) as well as the level, and biological activity of expressed gene products (such as PSCA mRNA, polynucleotides and polypeptides). Typically, an alteration in the status of PSCA comprises a change in the location of PSCA and/or PSCA expressing cells and/or an increase in PSCA mRNA and/or protein expression.

[0368] PSCA status in a sample can be analyzed by a number of means well known in the art, including without limitation, immunohistochemical analysis, in situ hybridization, RT-PCR analysis on laser capture micro-dissected samples, Western blot analysis, and tissue array analysis. Typical protocols for evaluating the status of a PSCA gene and gene products are found, for example in Ausubel et al. eds., 1995, Current Protocols In Molecular Biology, Units 2 (Northern Blotting), 4 (Southern Blotting), 15 (Immunoblotting) and 18 (PCR Analysis). Thus, the status of PSCA in a biological sample is evaluated by various methods utilized by skilled artisans including, but not limited to genomic Southern analysis (to examine, for example perturbations in a PSCA gene), Northern analysis and/or PCR analysis of PSCA mRNA (to examine, for example alterations in the polynucleotide sequences or expression levels of PSCA mRNAs), and, Western and/or immunohistochemical analysis (to examine, for example alterations in polypeptide sequences, alterations in polypeptide localization within a sample, alterations in expression levels of PSCA proteins and/or associations of PSCA proteins with polypeptide binding partners). Detectable PSCA polynucleotides include, for example, a PSCA gene or fragment thereof, PSCA mRNA, alternative splice variants, PSCA mRNAs, and recombinant DNA or RNA molecules containing a PSCA polynucleotide.

[0369] The expression profile of PSCA makes it a diagnostic marker for local and/or metastasized disease, and provides information on the growth or oncogenic potential of a biological sample. In particular, the status of PSCA provides information useful for predicting susceptibility to particular disease stages, progression, and/or tumor aggressiveness. The invention provides methods and assays for determining PSCA status and diagnosing cancers that express PSCA, such as cancers of the tissues listed in Table I. For example, because PSCA mRNA is so highly expressed in prostate and other cancers relative to normal prostate tissue, assays that evaluate the levels of PSCA mRNA transcripts or proteins in a biological sample can be used to diagnose a disease associated with PSCA dysregulation, and can provide prognostic information useful in defining appropriate therapeutic options.

[0370] The expression status of PSCA provides information including the presence, stage and location of dysplastic, precancerous and cancerous cells, predicting susceptibility to various stages of disease, and/or for gauging tumor aggressiveness. Moreover, the expression profile makes it useful as an imaging reagent for metastasized disease. Consequently, an aspect of the invention is directed to the various molecular prognostic and diagnostic methods for examining the status of PSCA in biological samples such as those from individuals suffering from, or suspected of suffering from a pathology characterized by dysregulated cellular growth, such as cancer.

[0371] As described above, the status of PSCA in a biological sample can be examined by a number of well-known procedures in the art. For example, the status of PSCA in a biological sample taken from a specific location in the body can be examined by evaluating the sample for the presence or absence of PSCA expressing cells (e.g. those that express PSCA mRNAs or proteins). This examination can provide evidence of dysregulated cellular growth, for example, when PSCA-expressing cells are found in a biological sample that does not normally contain such cells (such as a lymph node), because such alterations in the status of PSCA in a biological sample are often associated with dysregulated cellular growth. Specifically, one indicator of dysregulated cellular growth is the metastases of cancer cells from an organ of origin (such as the prostate) to a different area of the body (such as a lymph node). In this context, evidence of dysregulated cellular growth is important for example because occult lymph node metastases can be detected in a substantial proportion of patients with prostate cancer, and such metastases are associated with known predictors of disease progression (see, e.g., Murphy et al., Prostate 42(4): 315-317 (2000); Su et al., Semin. Surg. Oncol. 18(1): 17-28 (2000) and Freeman et al., J Urol 1995 August 154(2 Pt 1):474-8).

[0372] In one aspect, the invention provides methods for monitoring PSCA gene products by determining the status of PSCA gene products expressed by cells from an individual suspected of having a disease associated with dysregulated cell growth (such as hyperplasia or cancer) and then comparing the status so determined to the status of PSCA gene products in a corresponding normal sample. The presence of aberrant PSCA gene products in the test sample relative to the normal sample provides an indication of the presence of dysregulated cell growth within the cells of the individual.

[0373] In another aspect, the invention provides assays useful in determining the presence of cancer in an individual, comprising detecting a significant increase in PSCA mRNA or protein expression in a test cell or tissue sample relative to expression levels in the corresponding normal cell or tissue. The presence of PSCA mRNA can, for example, be evaluated in tissues including but not limited to those listed in Table I. The presence of significant PSCA expression in any of these tissues is useful to indicate the emergence, presence and/or severity of a cancer, since the corresponding normal tissues do not express PSCA mRNA or express it at lower levels.

[0374] In a related embodiment, PSCA status is determined at the protein level rather than at the nucleic acid level. For example, such a method comprises determining the level of PSCA protein expressed by cells in a test tissue sample and comparing the level so determined to the level of PSCA expressed in a corresponding normal sample. In one embodiment, the presence of PSCA protein is evaluated, for example, using immunohistochemical methods. PSCA antibodies or binding partners capable of detecting PSCA protein expression are used in a variety of assay formats well known in the art for this purpose.

[0375] In a further embodiment, one can evaluate the status of PSCA nucleotide and amino acid sequences in a biological sample in order to identify perturbations in the structure of these molecules. These perturbations can include insertions, deletions, substitutions and the like. Such evaluations are useful because perturbations in the nucleotide and amino acid sequences are observed in a large number of proteins associated with a growth dysregulated phenotype (see, e.g., Marrogi et al., 1999, J. Cutan. Pathol. 26(8):369-378). For example, a mutation in the sequence of PSCA may be indicative of the presence or promotion of a tumor. Such assays therefore have diagnostic and predictive value where a mutation in PSCA indicates a potential loss of function or increase in tumor growth.

[0376] A wide variety of assays for observing perturbations in nucleotide and amino acid sequences are well known in the art. For example, the size and structure of nucleic acid or amino acid sequences of PSCA gene products are observed by the Northern, Southern, Western, PCR and DNA sequencing protocols discussed herein. In addition, other methods for observing perturbations in nucleotide and amino acid sequences such as single strand conformation polymorphism analysis are well known in the art (see, e.g., U.S. Pat. No. 5,382,510 issued 7 Sep. 1999, and U.S. Pat. No. 5,952,170 issued 17 Jan. 1995).

[0377] Additionally, one can examine the methylation status of a PSCA gene in a biological sample. Aberrant demethylation and/or hypermethylation of CpG islands in gene 5′ regulatory regions frequently occurs in immortalized and transformed cells, and can result in altered expression of various genes. For example, promoter hypermethylabon of the pi-class glutathione S-transferase (a protein expressed in normal prostate but not expressed in >90% of prostate carcinomas) appears to permanently silence transcription of this gene and is the most frequently detected genomic alteration in prostate carcinomas (De Marzo et al., Am. J. Pathol. 155(6): 1985-1992 (1999)). In addition, this alteration is present in at least 70% of cases of high-grade prostatic intraepithelial neoplasia (PIN) (Brooks et al., Cancer Epidemiol. Biomarkers Prev., 1998, 7:531-536). In another example, expression of the LAGE-I tumor specific gene (which is not expressed in normal prostate but is expressed in 25-50% of prostate cancers) is induced by deoxy-azacytdine in lymphoblastoid cells, suggesting that tumoral expression is due to demethylation (Lethe et al, Int. J. Cancer 76(6): 903-908 (1998)). A variety of assays for examining methylation status of a gene are well known in the art. For example, one can utilize, in Southern hybridization approaches, methylation-sensitive restriction enzymes that cannot cleave sequences that contain methylated CpG sites to assess the methylation status of CpG islands. In addition, MSP (methylabon specific PCR) can rapidly profile the methylabon status of all the CpG sites present in a CpG island of a given gene. This procedure involves initial modification of DNA by sodium bisulfite (which will convert all unmethylated cytosines to uracil) followed by amplification using primers specific for methylated versus unmethylated DNA. Protocols involving methylation interference can also be found for example in Current Protocols In Molecular Biology, Unit 12, Frederick M. Ausubel et al. eds., 1995.

[0378] Gene amplification is an additional method for assessing the status of PSCA. Gene amplification is measured in a sample directly, for example, by conventional Southern blotting or Northern blotting to quantitate the transcription of mRNA (Thomas, 1980, Proc. Nat. Acad. Sci. USA, 77:5201-5205), dot blotting (DNA analysis), or in situ hybridization, using an appropriately labeled probe, based on the sequences provided herein. Alternatively, antibodies are employed that recognize specific duplexes, including DNA duplexes, RNA duplexes, and DNA-RNA hybrid duplexes or DNA-protein duplexes. The antibodies in turn are labeled and the assay carried out where the duplex is bound to a surface, so that upon the formation of duplex on the surface, the presence of antibody bound to the duplex can be detected.

[0379] Biopsied tissue or peripheral blood can be conveniently assayed for the presence of cancer cells using for example, Northern, dot blot or RT-PCR analysis to detect PSCA expression. The presence of RT-PCR amplifiable PSCA mRNA provides an indication of the presence of cancer. RT-PCR assays are well known in the art. RT-PCR detection assays for tumor cells in peripheral blood are currently being evaluated for use in the diagnosis and management of a number of human solid tumors. In the prostate cancer field, these include RT-PCR assays for the detection of cells expressing PSA and PSM (Verkaik et al, 1997, Urol. Res. 25:373-384; Ghossein et al., 1995, J. Clin. Oncol. 13:1195-2000; Heston et al., 1995, Clin. Chem. 41:1687-1688).

[0380] A further aspect of the invention is an assessment of the susceptibility that an individual has for developing cancer. In one embodiment, a method for predicting susceptibility to cancer comprises detecting PSCA mRNA or PSCA protein in a tissue sample, its presence indicating susceptibility to cancer, wherein the degree of PSCA mRNA expression correlates to the degree of susceptibility. In a specific embodiment, the presence of PSCA in prostate or other tissue is examined, with the presence of PSCA in the sample providing an indication of prostate cancer susceptibility (or the emergence or existence of a prostate tumor). Similarly, one can evaluate the integrity PSCA nucleotide and amino acid sequences in a biological sample, in order to identify perturbations in the structure of these molecules such as insertions, deletions, substitutions and the like. The presence of one or more perturbations in PSCA gene products in the sample is an indication of cancer susceptibility (or the emergence or existence of a tumor).

[0381] The invention also comprises methods for gauging tumor aggressiveness. In one embodiment, a method for gauging aggressiveness of a tumor comprises determining the level of PSCA mRNA or PSCA protein expressed by tumor cells, comparing the level so determined to the level of PSCA mRNA or PSCA protein expressed in a corresponding normal tissue taken from the same individual or a normal tissue reference sample, wherein the degree of PSCA mRNA or PSCA protein expression in the tumor sample relative to the normal sample indicates the degree of aggressiveness. In a specific embodiment, aggressiveness of a tumor is evaluated by determining the extent to which PSCA is expressed in the tumor cells, with higher expression levels indicating more aggressive tumors. Another embodiment is the evaluation of the integrity of PSCA nucleotide and amino acid sequences in a biological sample, in order to identify perturbations in the structure of these molecules such as insertions, deletions, substitutions and the like. The presence of one or more perturbations indicates more aggressive tumors.

[0382] Another embodiment of the invention is directed to methods for observing the progression of a malignancy in an individual over time. In one embodiment, methods for observing the progression of a malignancy in an individual over time comprise determining the level of PSCA mRNA or PSCA protein expressed by cells in a sample of the tumor, comparing the level so determined to the level of PSCA mRNA or PSCA protein expressed in an equivalent tissue sample taken from the same individual at a different time, wherein the degree of PSCA mRNA or PSCA protein expression in the tumor sample over time provides information on the progression of the cancer. In a specific embodiment, the progression of a cancer is evaluated by determining PSCA expression in the tumor cells over time, where increased expression over time indicates a progression of the cancer. Also, one can evaluate the integrity PSCA nucleotide and amino acid sequences in a biological sample in order to identify perturbations in the structure of these molecules such as insertions, deletions, substitutions and the like, where the presence of one or more perturbations indicates a progression of the cancer.

[0383] The above diagnostic approaches can be combined with any one of a wide variety of prognostic and diagnostic protocols known in the art. For example, another embodiment of the invention is directed to methods for observing a coincidence between the expression of PSCA gene and PSCA gene products (or perturbations in PSCA gene and PSCA gene products) and a factor that is associated with malignancy, as a means for diagnosing and prognosticating the status of a tissue sample. A wide variety of factors associated with malignancy can be utilized, such as the expression of genes associated with malignancy (e.g. PSA, PSCA and PSM expression for prostate cancer etc.) as well as gross cytological observations (see, e.g., Bocking et al., 1984, Anal. Quant. Cytol. 6(2):74-88; Epstein, 1995, Hum. Pathol. 26(2):223-9; Thorson et al., 1998, Mod. Pathol. 11(6):543-51; Baisden et al, 1999, Am. J. Surg. Pathol. 23(8):918-24). Methods for observing a coincidence between the expression of PSCA gene and PSCA gene products (or perturbations in PSCA gene and PSCA gene products) and another factor that is associated with malignancy are useful, for example, because the presence of a set of specific factors that coincide with disease provides information crucial for diagnosing and prognosticating the status of a tissue sample.

[0384] In one embodiment, methods for observing a coincidence between the expression of PSCA gene and PSCA gene products (or perturbations in PSCA gene and PSCA gene products) and another factor associated with malignancy entails detecting the overexpression of PSCA mRNA or protein in a tissue sample, detecting the overexpression of PSA mRNA or protein in a tissue sample (or PSCA or PSM expression), and observing a coincidence of PSCA mRNA or protein and PSA mRNA or protein overexpression (or PSCA or PSM expression). In a specific embodiment, the expression of PSCA and PSA mRNA in prostate tissue is examined, where the coincidence of PSCA and PSA mRNA overexpression in the sample indicates the existence of prostate cancer, prostate cancer susceptibility or the emergence or status of a prostate tumor.

[0385] Methods for detecting and quantifying the expression of PSCA mRNA or protein are described herein, and standard nucleic acid and protein detection and quantification technologies are well known in the art. Standard methods for the detection and quantification of PSCA mRNA include in situ hybridization using labeled PSCA riboprobes, Northern blot and related techniques using PSCA polynucleotide probes, RT-PCR analysis using primers specific for PSCA, and other amplification type detection methods, such as, for example, branched DNA, SISBA, TMA and the like. In a specific embodiment, semi-quantitative RT-PCR is used to detect and quantify PSCA mRNA expression. Any number of primers capable of amplifying PSCA can be used for this purpose, including but not limited to the various primer sets specifically described herein. In a specific embodiment, polyclonal or monoclonal antibodies specifically reactive with the wild-type PSCA protein can be used in an immunohistochemical assay of biopsied tissue.

[0386] IX.) Identification of Molecules that Interact with PSCA

[0387] The PSCA protein and nucleic acid sequences disclosed herein allow a skilled artisan to identify proteins, small molecules and other agents that interact with PSCA, as well as pathways activated by PSCA via any one of a variety of art accepted protocols. For example, one can utilize one of the so-called interaction trap systems (also referred to as the “two-hybrid assay”). In such systems, molecules interact and reconstitute a transcription factor which directs expression of a reporter gene, whereupon the expression of the reporter gene is assayed. Other systems identify protein-protein interactions in vivo through reconstitution of a eukaryotic transcriptional activator, see, e.g., U.S. Pat. No. 5,955,280 issued 21 Sep. 1999, U.S. Pat. No. 5,925,523 issued 20 Jul. 1999, U.S. Pat. No. 5,846,722 issued 8 Dec. 1998 and U.S. Pat. No. 6,004,746 issued 21 Dec. 1999. Algorithms are also available in the art for genome-based predictions of protein function (see, e.g., Marcotte, et al., Nature 402: 4 Nov. 1999, 83-86).

[0388] Alternatively one can screen peptide libraries to identify molecules that interact with PSCA protein sequences. In such methods, peptides that bind to PSCA are identified by screening libraries that encode a random or controlled collection of amino acids. Peptides encoded by the libraries are expressed as fusion proteins of bacteriophage coat proteins, the bacteriophage particles are then screened against the PSCA protein(s).

[0389] Accordingly, peptides having a wide variety of uses, such as therapeutic, prognostic or diagnostic reagents, are thus identified without any prior information on the structure of the expected ligand or receptor molecule. Typical peptide libraries and screening methods that can be used to identify molecules that interact with PSCA protein sequences are disclosed for example in U.S. Pat. No. 5,723,286 issued 3 Mar. 1998 and U.S. Pat. No. 5,733,731 issued 31 Mar. 1998.

[0390] Alternatively, cell lines that express PSCA are used to identify protein-protein interactions mediated by PSCA. Such interactions can be examined using immunoprecipitation techniques (see, e.g., Hamilton B. J., et al. Biochem. Biophys. Res. Commun. 1999, 261:646-51). PSCA protein can be immunoprecipitated from PSCA-expressing cell lines using anti-PSCA antibodies. Alternatively, antibodies against His-tag can be used in a cell line engineered to express fusions of PSCA and a His-tag (vectors mentioned above). The immunoprecipitated complex can be examined for protein association by procedures such as Western blotting, ³⁵S-methionine labeling of proteins, protein microsequencing, silver staining and two-dimensional gel electrophoresis.

[0391] Small molecules and ligands that interact with PSCA can be identified through related embodiments of such screening assays. For example, small molecules can be identified that interfere with protein function, including molecules that interfere with PSCA's ability to mediate phosphorylation and de-phosphorylation, interaction with DNA or RNA molecules as an indication of regulation of cell cycles, second messenger signaling or tumorigenesis. Similarly, small molecules that modulate PSCA-related ion channel, protein pump, or cell communication functions are identified and used to treat patients that have a cancer that expresses PSCA (see, e.g., Hille, B., Ionic Channels of Excitable Membranes 2^{nd} Ed., Sinauer Assoc., Sunderland, Mass., 1992). Moreover, ligands that regulate PSCA function can be identified based on their ability to bind PSCA and activate a reporter construct. Typical methods are discussed for example in U.S. Pat. No. 5,928,868 issued 27 Jul. 1999, and include methods for forming hybrid ligands in which at least one ligand is a small molecule. In an illustrative embodiment, cells engineered to express a fusion protein of PSCA and a DNA-binding protein are used to co-express a fusion protein of a hybrid ligand/small molecule and a cDNA library transcriptional activator protein. The cells further contain a reporter gene, the expression of which is conditioned on the proximity of the first and second fusion proteins to each other, an event that occurs only if the hybrid ligand binds to target sites on both hybrid proteins. Those cells that express the reporter gene are selected and the unknown small molecule or the unknown ligand is identified. This method provides a means of identifying modulators, which activate or inhibit PSCA.

[0392] An embodiment of this invention comprises a method of screening for a molecule that interacts with a PSCA amino acid sequence shown in FIG. 2 or FIG. 3, comprising the steps of contacting a population of molecules with a PSCA amino acid sequence, allowing the population of molecules and the PSCA amino acid sequence to interact under conditions that facilitate an interaction, determining the presence of a molecule that interacts with the PSCA amino acid sequence, and then separating molecules that do not interact with the PSCA amino acid sequence from molecules that do. In a specific embodiment, the method further comprises purifying, characterizing and identifying a molecule that interacts with the PSCA amino acid sequence. The identified molecule can be used to modulate a function performed by PSCA. In a preferred embodiment, the PSCA amino acid sequence is contacted with a library of peptides.

[0393] X.) Therapeutic Methods and Compositions

[0394] The identification of PSCA as a protein that is normally expressed in a restricted set of tissues, but which is also expressed in cancers such as those listed in Table I, opens a number of therapeutic approaches to the treatment of such cancers.

[0395] Of note, targeted antitumor therapies have been useful even when the targeted protein is expressed on normal tissues, even vital normal organ tissues. A vital organ is one that is necessary to sustain life, such as the heart or colon. A non-vital organ is one that can be removed whereupon the individual is still able to survive. Examples of non-vital organs are ovary, breast, and prostate.

[0396] For example, Herceptin® is an FDA approved pharmaceutical that has as its active ingredient an antibody which is immunoreactive with the protein variously known as HER2, HER21neu, and erb-b-2. It is marketed by Genentech and has been a commercially successful antitumor agent. Herceptin sales reached almost $400 million in 2002. Herceptin is a treatment for HER2 positive metastatic breast cancer. However, the expression of HER2 is not limited to such tumors. The same protein is expressed in a number of normal tissues. In particular, it is known that HER2/neu is present in normal kidney and heart, thus these tissues are present in all human recipients of Herceptin. The presence of HER2/neu in normal kidney is also confirmed by Latif, Z., et al., B.J.U. International (2002) 89:5-9. As shown in this article (which evaluated whether renal cell carcinoma should be a preferred indication for anti-HER2 antibodies such as Herceptin) both protein and mRNA are produced in benign renal tissues. Notably, HER2/neu protein was strongly overexpressed in benign renal tissue.

[0397] Despite the fact that HER2/neu is expressed in such vital tissues as heart and kidney, Herceptin is a very useful, FDA approved, and commercially successful drug. The effect of Herceptin on cardiac tissue, i.e., “cardiotoxicity,” has merely been a side effect to treatment. When patients were treated with Herceptin alone, significant cardiotoxicity occurred in a very low percentage of patients.

[0398] Of particular note, although kidney tissue is indicated to exhibit normal expression, possibly even higher expression than cardiac tissue, kidney has no appreciable Herceptin side effect whatsoever. Moreover, of the diverse array of normal tissues in which HER2 is expressed, there is very little occurrence of any side effect. Only cardiac tissue has manifested any appreciable side effect at all. A tissue such as kidney, where HER2/neu expression is especially notable, has not been the basis for any side effect.

[0399] Furthermore, favorable therapeutic effects have been found for antitumor therapies that target epidermal growth factor receptor (EGFR). EGFR is also expressed in numerous normal tissues. There have been very limited side effects in normal tissues following use of anti-EGFR therapeutics.

[0400] Thus, expression of a target protein in normal tissue, even vital normal tissue, does not defeat the utility of a targeting agent for the protein as a therapeutic for certain tumors in which the protein is also overexpressed.

[0401] Accordingly, therapeutic approaches that inhibit the activity of a PSCA protein are useful for patients suffering from a cancer that expresses PSCA. These therapeutic approaches generally fall into two classes. One class comprises various methods for inhibiting the binding or association of a PSCA protein with its binding partner or with other proteins. Another class comprises a variety of methods for inhibiting the transcription of a PSCA gene or translation of PSCA mRNA.

[0402] X.A.) Anti-Cancer Vaccines

[0403] The invention provides cancer vaccines comprising a PSCA-related protein or PSCA-related nucleic acid. In view of the expression of PSCA, cancer vaccines prevent and/or treat PSCA-expressing cancers with minimal or no effects on non-target tissues. The use of a tumor antigen in a vaccine that generates humoral and/or cell-mediated immune responses as anti-cancer therapy is well known in the art and has been employed in prostate cancer using human PSMA and rodent PAP immunogens (Hodge et al., 1995, Int. J. Cancer 63:231-237; Fong et al., 1997, J. Immunol. 159:3113-3117).

[0404] Such methods can be readily practiced by employing a PSCA-related protein, or a PSCA-encoding nucleic acid molecule and recombinant vectors capable of expressing and presenting the PSCA immunogen (which typically comprises a number of antibody or T cell epitopes). Skilled artisans understand that a wide variety of vaccine systems for delivery of immunoreactive epitopes are known in the art (see, e.g., Heryln et al., Ann Med 1999 February 31(1):66-78; Maruyama et al., Cancer Immunol Immunother 2000 June 49(3):123-32) Briefly, such methods of generating an immune response (e.g. humoral and/or cell-mediated) in a mammal, comprise the steps of: exposing the mammal's immune system to an immunoreactive epitope (e.g. an epitope present in a PSCA protein shown in FIG. 3 or analog or homolog thereof) so that the mammal generates an immune response that is specific for that epitope (e.g. generates antibodies that specifically recognize that epitope). In a preferred method, a PSCA immunogen contains a biological motif, see e.g., Tables VIII-XXI and XXII-XLIX, or a peptide of a size range from PSCA indicated in FIG. 5, FIG. 6, FIG. 7, FIG. 8, and FIG. 9.

[0405] The entire PSCA protein, immunogenic regions or epitopes thereof can be combined and delivered by various means. Such vaccine compositions can include, for example, lipopeptides (e.g., Vitiello, A. et al., J. Clin. Invest. 95:341, 1995), peptide compositions encapsulated in poly(DL-lactide-co-glycolide) (“PLG”) microspheres (see, e.g., Eldridge, et al., Molec. Immunol. 28:287-294, 1991: Alonso et al., Vaccine 12:299-306, 1994; Jones et al., Vaccine 13:675-681, 1995), peptide compositions contained in immune stimulating complexes (ISCOMS) (see, e.g., Takahashi et al., Nature 344:873-875, 1990; Hu et al., Clin Exp Immunol. 113:235-243, 1998), multiple antigen peptide systems (MAPs) (see e.g., Tam, J. P., Proc. Natl. Acad. Sci. U.S.A. 85:5409-5413, 1988; Tam, J. P., J. Immunol. Methods 196:17-32, 1996), peptides formulated as multivalent peptides; peptides for use in ballistic delivery systems, typically crystallized peptides, viral delivery vectors (Perkus, M. E. et al., In: Concepts in vaccine development, Kaufmann, S. H. E., ed., p. 379, 1996; Chakrabarti, S. et al., Nature 320:535, 1986; Hu, S. L. et al., Nature 320:537, 1986; Kieny, M.-P. et al., AIDS Bio/Technology 4:790, 1986; Top, F. H. et al., J. Infect. Dis. 124:148, 1971; Chanda, P. K. et al., Virology 175:535, 1990), particles of viral or synthetic origin (e.g., Kofler, N. et al., J. Immunol. Methods. 192:25, 1996; Eldridge, J. H. et al., Sem. Hematol. 30:16, 1993; Falo, L. D., Jr. et al., Nature Med. 7:649, 1995), adjuvants (Warren, H. S., Vogel, F. R., and Chedid, L. A. Annu. Rev. Immunol. 4:369, 1986; Gupta, R. K. et al., Vaccine 11:293, 1993), liposomes (Reddy, R. et al., J. Immunol. 148:1585, 1992; Rock, K. L., Immunol. Today 17:131, 1996), or, naked or particle absorbed cDNA (Ulmer, J. B. et al., Science 259:1745, 1993; Robinson, H. L., Hunt, L. A., and Webster, R. G., Vaccine 11:957, 1993; Shiver, J. W. et al., In: Concepts in vaccine development, Kaufmann, S. H. E., ed., p. 423, 1996; Cease, K. B., and Berzofsky, J. A., Annu. Rev. Immunol. 12:923, 1994 and Eldridge, J. H. et al., Sem. Hematol. 30:16, 1993). Toxin-targeted delivery technologies, also known as receptor mediated targeting, such as those of Avant Immunotherapeutics, Inc. (Needham, Mass.) may also be used.

[0406] In patients with PSCA-associated cancer, the vaccine compositions of the invention can also be used in conjunction with other treatments used for cancer, e.g., surgery, chemotherapy, drug therapies, radiation therapies, etc. including use in combination with immune adjuvants such as IL-2, IL-12, GM-CSF, and the like.

[0407] Cellular Vaccines:

[0408] CTL epitopes can be determined using specific algorithms to identify peptides within PSCA protein that bind corresponding HLA alleles (see e.g., Table IV; Epimer™ and Epimatrix™, Brown University (URL brown.edu/Research/TB-HIV_Lab/epimatrix/epimatrix.html); and, BIMAS, (URL bimas.dcrt.nih.gov/; SYFPEITHI at URL syfpeithi.bmi-heidelberg.com/). In a preferred embodiment, a PSCA immunogen contains one or more amino acid sequences identified using techniques well known in the art, such as the sequences shown in Tables VIII-XXI and XXII-XLIX or a peptide of 8, 9, 10 or 11 amino acids specified by an HLA Class I motif/supermotif (e.g., Table IV (A), Table IV (D), or Table IV (E)) and/or a peptide of at least 9 amino acids that comprises an HLA Class II motif/supermotif (e.g., Table IV (B) or Table IV (C)). As is appreciated in the art, the HLA Class I binding groove is essentially closed ended so that peptides of only a particular size range can fit into the groove and be bound, generally HLA Class I epitopes are 8, 9, 10, or 11 amino acids long. In contrast, the HLA Class II binding groove is essentially open ended; therefore a peptide of about 9 or more amino acids can be bound by an HLA Class II molecule. Due to the binding groove differences between HLA Class I and II, HLA Class I motifs are length specific, i.e., position two of a Class I motif is the second amino acid in an amino to carboxyl direction of the peptide. The amino acid positions in a Class II motif are relative only to each other, not the overall peptide, i.e., additional amino acids can be attached to the amino and/or carboxyl termini of a motif-bearing sequence. HLA Class II epitopes are often 9, 10, 11, 12, 13, 14, 15, 16, 17, 18, 19, 20, 21, 22, 23, 24, or 25 amino acids long, or longer than 25 amino acids.

[0409] Antibody-Based Vaccines

[0410] A wide variety of methods for generating an immune response in a mammal are known in the art (for example as the first step in the generation of hybridomas). Methods of generating an immune response in a mammal comprise exposing the mammal's immune system to an immunogenic epitope on a protein (e.g. a PSCA protein) so that an immune response is generated. A typical embodiment consists of a method for generating an immune response to PSCA in a host, by contacting the host with a sufficient amount of at least one PSCA B cell or cytotoxic T-cell epitope or analog thereof; and at least one periodic interval thereafter re-contacting the host with the PSCA B cell or cytotoxic T-cell epitope or analog thereof. A specific embodiment consists of a method of generating an immune response against a PSCA-related protein or a man-made multepitopic peptide comprising: administering PSCA immunogen (e.g. a PSCA protein or a peptide fragment thereof, a PSCA fusion protein or analog etc.) in a vaccine preparation to a human or another mammal. Typically, such vaccine preparations further contain a suitable adjuvant (see, e.g., U.S. Pat. No. 6,146,635) or a universal helper epitope such as a PADRE™ peptide (Epimmune Inc., San Diego, Calif.; see, e.g., Alexander et al., J. Immunol. 2000 164(3); 164(3): 1625-1633; Alexander et al., Immunity 1994 1(9): 751-761 and Alexander et al., Immunol. Res. 1998 18(2): 79-92). An alternative method comprises generating an immune response in an individual against a PSCA immunogen by: administering in vivo to muscle or skin of the individual's body a DNA molecule that comprises a DNA sequence that encodes a PSCA immunogen, the DNA sequence operatively linked to regulatory sequences which control the expression of the DNA sequence; wherein the DNA molecule is taken up by cells, the DNA sequence is expressed in the cells and an immune response is generated against the immunogen (see, e.g., U.S. Pat. No. 5,962,428). Optionally a genetic vaccine facilitator such as anionic lipids; saponins; fectins; estrogenic compounds; hydroxylated lower alkyls; dimethyl sulfoxide; and urea is also administered. In addition, an antiidiotypic antibody can be administered that mimics PSCA, in order to generate a response to the target antigen.

[0411] Nucleic Acid Vaccines:

[0412] Vaccine compositions of the invention include nucleic acid-mediated modalities. DNA or RNA that encode protein(s) of the invention can be administered to a patient. Genetic immunization methods can be employed to generate prophylactic or therapeutic humoral and cellular immune responses directed against cancer cells expressing PSCA. Constructs comprising DNA encoding a PSCA-related protein/immunogen and appropriate regulatory sequences can be injected directly into muscle or skin of an individual, such that the cells of the muscle or skin take-up the construct and express the encoded PSCA protein/immunogen. Alternatively, a vaccine comprises a PSCA-related protein. Expression of the PSCA-related protein immunogen results in the generation of prophylactic or therapeutic humoral and cellular immunity against cells that bear a PSCA protein. Various prophylactic and therapeutic genetic immunization techniques known in the art can be used (for review, see information and references published at Internet address genweb.com). Nucleic acid-based delivery is described, for instance, in Wolff et. al., Science 247:1465 (1990) as well as U.S. Pat. Nos. 5,580,859; 5,589,466; 5,804,566; 5,739,118; 5,736,524; 5,679,647; WO 98/04720. Examples of DNA-based delivery technologies include “naked DNA”, facilitated (bupivicaine, polymers, peptide-mediated) delivery, cationic lipid complexes, and particle-mediated (“gene gun”) or pressure-mediated delivery (see, e.g., U.S. Pat. No. 5,922,687).

[0413] For therapeutic or prophylactic immunization purposes, proteins of the invention can be expressed via viral or bacterial vectors. Various viral gene delivery systems that can be used in the practice of the invention include, but are not limited to, vaccinia, fowlpox, canarypox, adenovirus, influenza, poliovirus, adeno-associated virus, lentivirus, and sindbis virus (see, e.g., Restifo, 1996, Curr. Opin. Immunol. 8:658-663; Tsang et al. J. Natl. Cancer Inst. 87:982-990 (1995)). Non-viral delivery systems can also be employed by introducing naked DNA encoding a PSCA-related protein into the patent (e.g., intramuscularly or intradermally) to induce an anti-tumor response.

[0414] Vaccinia virus is used, for example, as a vector to express nucleotide sequences that encode the peptides of the invention. Upon introduction into a host, the recombinant vaccinia virus expresses the protein immunogenic peptide, and thereby elicits a host immune response. Vaccinia vectors and methods useful in immunization protocols are described in, e.g., U.S. Pat. No. 4,722,848. Another vector is BCG (Bacille Calmette Guerin). BCG vectors are described in Stover et al., Nature 351:456-460 (1991). A wide variety of other vectors useful for therapeutic administration or immunization of the peptides of the invention, e.g. adeno and adeno-associated virus vectors, retroviral vectors, Salmonella typhi vectors, detoxified anthrax toxin vectors, and the like, will be apparent to those skilled in the art from the description herein.

[0415] Thus, gene delivery systems are used to deliver a PSCA-related nucleic acid molecule. In one embodiment, the full-length human PSCA cDNA is employed. In another embodiment, PSCA nucleic acid molecules encoding specific cytotoxic T lymphocyte (CTL) and/or antibody epitopes are employed.

[0416] Ex Vivo Vaccines

[0417] Various ex vivo strategies can also be employed to generate an immune response. One approach involves the use of antigen presenting cells (APCs) such as dendritic cells (DC) to present PSCA antigen to a patent's immune system. Dendritic cells express MHC class I and II molecules, B7 co-stimulator, and IL-12, and are thus highly specialized antigen presenting cells. In prostate cancer, autologous dendritic cells pulsed with peptides of the prostate-specific membrane antigen (PSMA) are being used in a Phase I clinical trial to stimulate prostate cancer patients' immune systems (Tjoa et al., 1996, Prostate 28:65-69; Murphy et al., 1996, Prostate 29:371-380). Thus, dendritic cells can be used to present PSCA peptides to T cells in the context of MHC class I or II molecules. In one embodiment, autologous dendritic cells are pulsed with PSCA peptides capable of binding to MHC class I and/or class II molecules. In another embodiment, dendritic cells are pulsed with the complete PSCA protein. Yet another embodiment involves engineering the overexpression of a PSCA gene in dendritic cells using various implementing vectors known in the art, such as adenovirus (Arthur et al., 1997, Cancer Gene Ther. 4:17-25), retrovirus (Henderson et al., 1996, Cancer Res. 56:3763-3770), lentivirus, adeno-associated virus, DNA transfection (Ribas et al., 1997, Cancer Res. 57:2865-2869), or tumor-derived RNA transfection (Ashley et al., 1997, J. Exp. Med. 186:1177-1182). Cells that express PSCA can also be engineered to express immune modulators, such as GM-CSF, and used as immunizing agents.

[0418] X.B.) PSCA as a Target for Antibody-Based Therapy

[0419] 511582008800able the use of reduced dosages of concomitant chemotherapy, particularly for patients who do not tolerate the toxicity of the chemotherapeutic agent very well.

[0420] Cancer patients can be evaluated for the presence and level of PSCA expression, preferably using immunohistochemical assessments of tumor tissue, quantitative PSCA imaging, or other techniques that reliably indicate the presence and degree of PSCA expression. Immunohistochemical analysis of tumor biopsies or surgical specimens is preferred for this purpose. Methods for immunohistochemical analysis of tumor tissues are well known in the art.

[0421] Anti-PSCA monoclonal antibodies that treat prostate and other cancers include those that initiate a potent immune response against the tumor or those that are directly cytotoxic. In this regard, anti-PSCA monoclonal antibodies (mAbs) can elicit tumor cell lysis by either complement-mediated or antibody-dependent cell cytotoxicity (ADCC) mechanisms, both of which require an intact Fc portion of the immunoglobulin molecule for interaction with effector cell Fc receptor sites on complement proteins. In addition, anti-PSCA mAbs that exert a direct biological effect on tumor growth are useful to treat cancers that express PSCA. Mechanisms by which directly cytotoxic mAbs act include: inhibition of cell growth, modulation of cellular differentiation, modulation of tumor angiogenesis factor profiles, and the induction of apoptosis. The mechanism(s) by which a particular anti-PSCA mAb exerts an anti-tumor effect is evaluated using any number of in vitro assays that evaluate cell death such as ADCC, ADMMC, complement-mediated cell lysis, and so forth, as is generally known in the art.

[0422] In some patients, the use of murine or other non-human monoclonal antibodies, or human/mouse chimeric mAbs can induce moderate to strong immune responses against the non-human antibody. This can result in clearance of the antibody from circulation and reduced efficacy. In the most severe cases, such an immune response can lead to the extensive formation of immune complexes which, potentially, can cause renal failure. Accordingly, preferred monoclonal antibodies used in the therapeutic methods of the invention are those that are either fully human or humanized and that bind specifically to the target PSCA antigen with high affinity but exhibit low or no antigenicity in the patient.

[0423] Therapeutic methods of the invention contemplate the administration of single anti-PSCA mAbs as well as combinations, or cocktails, of different mAbs. Such mAb cocktails can have certain advantages inasmuch as they contain mAbs that target different epitopes, exploit different effector mechanisms or combine directly cytotoxic mAbs with mAbs that rely on immune effector functionality. Such mAbs in combination can exhibit synergistic therapeutic effects. In addition, anti-PSCA mAbs can be administered concomitantly with other therapeutic modalities, including but not limited to various chemotherapeutic agents, androgen-blockers, immune modulators (e.g., IL-2, GM-CSF), surgery or radiation. The anti-PSCA mAbs are administered in their “naked” or unconjugated form, or can have a therapeutic agent(s) conjugated to them.

[0424] Anti-PSCA antibody formulations are administered via any route capable of delivering the antibodies to a tumor cell. Routes of administration include, but are not limited to, intravenous, intraperitoneal, intramuscular, intratumor, intradermal, and the like. Treatment generally involves repeated administration of the anti-PSCA antibody preparation, via an acceptable route of administration such as intravenous injection (IV), typically at a dose in the range of about 0.1, 0.2, 0.3, 0.4, 0.5, 0.6, 0.7, 0.8, 0.9, 1, 2, 3, 4, 5, 6, 7, 8, 9, 10, 15, 20, or 25 mg/kg body weight. In general, doses in the range of 10-1000 mg mAb per week are effective and well tolerated.

[0425] Based on clinical experience with the Herceptin™ mAb in the treatment of metastatic breast cancer, an initial loading dose of approximately 4 mg/kg patient body weight IV, followed by weekly doses of about 2 mg/kg IV of the anti-PSCA mAb preparation represents an acceptable dosing regimen. Preferably, the initial loading dose is administered as a 90-minute or longer infusion. The periodic maintenance dose is administered as a 30 minute or longer infusion, provided the initial dose was well tolerated. As appreciated by those of skill in the art, various factors can influence the ideal dose regimen in a particular case. Such factors include, for example, the binding affinity and half life of the Ab or mAbs used, the degree of PSCA expression in the patient, the extent of circulating shed PSCA antigen, the desired steady-state antibody concentration level, frequency of treatment, and the influence of chemotherapeutic or other agents used in combination with the treatment method of the invention, as well as the health status of a particular patient.

[0426] Optionally, patients should be evaluated for the levels of PSCA in a given sample (e.g. the levels of circulating PSCA antigen and/or PSCA expressing cells) in order to assist in the determination of the most effective dosing regimen, etc. Such evaluations are also used for monitoring purposes throughout therapy, and are useful to gauge therapeutic success in combination with the evaluation of other parameters (for example, urine cytology and/or ImmunoCyt levels in bladder cancer therapy, or by analogy, serum PSA levels in prostate cancer therapy).

[0427] Anti-idiotypic anti-PSCA antibodies can also be used in anti-cancer therapy as a vaccine for inducing an immune response to cells expressing a PSCA-related protein. In particular, the generation of anti-idiotypic antibodies is well known in the art; this methodology can readily be adapted to generate anti-idiotypic anti-PSCA antibodies that mimic an epitope on a PSCA-related protein (see, for example, Wagner et al., 1997, Hybridoma 16: 33-40; Foon et al., 1995, J. Clin. Invest. 96:334-342; Heriyn et al., 1996, Cancer Immunol. Immunother. 43:65-76). Such an anti-idiotypic antibody can be used in cancer vaccine strategies.

[0428] X.C.) PSCA as a Target for Cellular Immune Responses

[0429] Vaccines and methods of preparing vaccines that contain an immunogenically effective amount of one or more HLA-binding peptides as described herein are further embodiments of the invention. Furthermore, vaccines in accordance with the invention encompass compositions of one or more of the claimed peptides. A peptide can be present in a vaccine individually. Alternatively, the peptide can exist as a homopolymer comprising multiple copies of the same peptide, or as a heteropolymer of various peptides. Polymers have the advantage of increased immunological reaction and, where different peptide epitopes are used to make up the polymer, the additional ability to induce antibodies and/or CTLs that react with different antigenic determinants of the pathogenic organism or tumor-related peptide targeted for an immune response. The composition can be a naturally occurring region of an antigen or can be prepared, e.g., recombinantiy or by chemical synthesis.

[0430] Carriers that can be used with vaccines of the invention are well known in the art, and include, e.g., thyroglobulin, albumins such as human serum albumin, tetanus toxoid, polyamino acids such as poly L-lysine, poly L-glutamic acid, influenza, hepatitis B virus core protein, and the like. The vaccines can contain a physiologically tolerable (i.e., acceptable) diluent such as water, or saline, preferably phosphate buffered saline. The vaccines also typically include an adjuvant. Adjuvants such as incomplete Freund's adjuvant, aluminum phosphate, aluminum hydroxide, or alum are examples of materials well known in the art. Additionally, as disclosed herein, CTL responses can be primed by conjugating peptides of the invention to lipids, such as tripalmitoyl-S-glycerylcysteinlyseryl-serine (P₃CSS). Moreover, an adjuvant such as a synthetic cytosine-phosphorothiolated-guanine-containing (CpG) oligonucleotides has been found to increase CTL responses 10- to 100-fold. (see, e.g. Davila and Celis, J. Immunol. 165:539-547 (2000))

[0431] Upon immunization with a peptide composition in accordance with the invention, via injection, aerosol, oral, transdermal, transmucosal, intrapleural, intrathecal, or other suitable routes, the immune system of the host responds to the vaccine by producing large amounts of CTLs and/or HTLs specific for the desired antigen. Consequently, the host becomes at least partially immune to later development of cells that express or overexpress PSCA antigen, or derives at least some therapeutic benefit when the antigen was tumor-associated.

[0432] In some embodiments, it may be desirable to combine the class I peptide components with components that induce or facilitate neutralizing antibody and or helper T cell responses directed to the target antigen. A preferred embodiment of such a composition comprises class I and class II epitopes in accordance with the invention. An alternative embodiment of such a composition comprises a class I and/or class 11 epitope in accordance with the invention, along with a cross reactive HTL epitope such as PADRE™ (Epimmune, San Diego, Calif.) molecule (described e.g., in U.S. Pat. No. 5,736,142).

[0433] A vaccine of the invention can also include antigen-presenting cells (APC), such as dendritic cells (DC), as a vehicle to present peptides of the invention. Vaccine compositions can be created in vitro, following dendritic cell mobilization and harvesting, whereby loading of dendritic cells occurs in vitro. For example, dendritic cells are transfected, e.g., with a minigene in accordance with the invention, or are pulsed with peptides. The dendritic cell can then be administered to a patient to elicit immune responses in vivo. Vaccine compositions, either DNA- or peptide-based, can also be administered in vivo in combination with dendritic cell mobilization whereby loading of dendritic cells occurs in vivo.

[0434] Preferably, the following principles are utilized when selecting an array of epitopes for inclusion in a polyepitopic composition for use in a vaccine, or for selecting discrete epitopes to be included in a vaccine and/or to be encoded by nucleic acids such as a minigene. It is preferred that each of the following principles be balanced in order to make the selection. The multiple epitopes to be incorporated in a given vaccine composition may be, but need not be, contiguous in sequence in the native antigen from which the epitopes are derived.

[0435] 1.) Epitopes are selected which, upon administration, mimic immune responses that have been observed to be correlated with tumor clearance. For HLA Class I this includes 3-4 epitopes that come from at least one tumor associated antigen (TAA). For HLA Class II a similar rationale is employed; again 3-4 epitopes are selected from at least one TAA (see, e.g., Rosenberg et al., Science 278:1447-1450). Epitopes from one TAA may be used in combination with epitopes from one or more additional TAAs to produce a vaccine that targets tumors with varying expression patterns of frequently-expressed TAAs.

[0436] 2.) Epitopes are selected that have the requisite binding affinity established to be correlated with immunogenicity: for HLA Class I an IC₅₀ of 500 nM or less, often 200 nM or less; and for Class II an IC₅₀ of 1000 nM or less.

[0437] 3.) Sufficient supermotif bearing-peptides, or a sufficient array of allele-specific motif-bearing peptides, are selected to give broad population coverage. For example, it is preferable to have at least 80% population coverage. A Monte Carlo analysis, a statistical evaluation known in the art, can be employed to assess the breadth, or redundancy of, population coverage.

[0438] 4.) When selecting epitopes from cancer-related antigens it is often useful to select analogs because the patent may have developed tolerance to the native epitope.

[0439] 5.) Of particular relevance are epitopes referred to as “nested epitopes.” Nested epitopes occur where at least two epitopes overlap in a given peptide sequence. A nested peptide sequence can comprise B cell, HLA class I and/or HLA class II epitopes. When providing nested epitopes, a general objective is to provide the greatest number of epitopes per sequence. Thus, an aspect is to avoid providing a peptide that is any longer than the amino terminus of the amino terminal epitope and the carboxyl terminus of the carboxyl terminal epitope in the peptide. When providing a multi-epitopic sequence, such as a sequence comprising nested epitopes, it is generally important to screen the sequence in order to insure that it does not have pathological or other deleterious biological properties.

[0440] 6.) If a polyepitopic protein is created, or when creating a minigene, an objective is to generate the smallest peptide that encompasses the epitopes of interest. This principle is similar, if not the same as that employed when selecting a peptide comprising nested epitopes. However, with an artificial polyepitopic peptide, the size minimization objective is balanced against the need to integrate any spacer sequences between epitopes in the polyepitopic protein. Spacer amino acid residues can, for example, be introduced to avoid junctional epitopes (an epitope recognized by the immune system, not present in the target antigen, and only created by the man-made juxtaposition of epitopes), or to facilitate cleavage between epitopes and thereby enhance epitope presentation. Junctional epitopes are generally to be avoided because the recipient may generate an immune response to that non-native epitope. Of particular concern is a junctional epitope that is a “dominant epitope.” A dominant epitope may lead to such a zealous response that immune responses to other epitopes are diminished or suppressed.

[0441] 7.) Where the sequences of multiple variants of the same target protein are present, potential peptide epitopes can also be selected on the basis of their conservancy. For example, a criterion for conservancy may define that the entire sequence of an HLA class I binding peptide or the entire 9-mer core of a class 11 binding peptide be conserved in a designated percentage of the sequences evaluated for a specific protein antigen.

[0442] X.C.1. Minigene Vaccines

[0443] A number of different approaches are available which allow simultaneous delivery of multiple epitopes. Nucleic acids encoding the peptides of the invention are a particularly useful embodiment of the invention. Epitopes for inclusion in a minigene are preferably selected according to the guidelines set forth in the previous section. A preferred means of administering nucleic acids encoding the peptides of the invention uses minigene constructs encoding a peptide comprising one or multiple epitopes of the invention.

[0444] The use of multi-epitope minigenes is described below and in, Ishioka et al., J. Immunol. 162:3915-3925, 1999; An, L. and Whitton, J. L., J. Virol. 71:2292, 1997; Thomson, S. A. et al., J. Immunol. 157:822, 1996; Whitton, J. L. et al., J. Virol. 67:348, 1993; Hanke, R. et al., Vaccine 16:426, 1998. For example, a multi-epitope DNA plasmid encoding supermotif- and/or motif-bearing epitopes derived PSCA, the PADRE® universal helper T cell epitope or multiple HTL epitopes from PSCA (see e.g., Tables VIII-XXI and XXII to XLIX), and an endoplasmic retculum-translocating signal sequence can be engineered. A vaccine may also comprise epitopes that are derived from other TAAs.

[0445] The immunogenicity of a multi-epitopic minigene can be confirmed in transgenic mice to evaluate the magnitude of CTL induction responses against the epitopes tested. Further, the immunogenicity of DNA-encoded epitopes in vivo can be correlated with the in vitro responses of specific CTL lines against target cells transfected with the DNA plasmid. Thus, these experiments can show that the minigene serves to both: 1.) generate a CTL response and 2.) that the induced CTLs recognized cells expressing the encoded epitopes.

[0446] For example, to create a DNA sequence encoding the selected epitopes (minigene) for expression in human cells, the amino acid sequences of the epitopes may be reverse translated. A human codon usage table can be used to guide the codon choice for each amino acid. These epitope-encoding DNA sequences may be directly adjoined, so that when translated, a continuous polypeptide sequence is created. To optimize expression and/or immunogenicity, additional elements can be incorporated into the minigene design. Examples of amino acid sequences that can be reverse translated and included in the minigene sequence include: HLA class I epitopes, HLA class II epitopes, antibody epitopes, a ubiquitination signal sequence, and/or an endoplasmic reticulum targeting signal. In addition, HLA presentation of CTL and HTL epitopes may be improved by including synthetic (e.g. poly-alanine) or naturally-occurring flanking sequences adjacent to the CTL or HTL epitopes; these larger peptides comprising the epitope(s) are within the scope of the invention.

[0447] The minigene sequence may be converted to DNA by assembling oligonucleotides that encode the plus and minus strands of the minigene. Overlapping oligonucleotides (30-100 bases long) may be synthesized, phosphorylated, purified and annealed under appropriate conditions using well known techniques. The ends of the oligonucleotides can be joined, for example, using T4 DNA ligase. This synthetic minigene, encoding the epitope polypeptide, can then be cloned into a desired expression vector.

[0448] Standard regulatory sequences well known to those of skill in the art are preferably included in the vector to ensure expression in the target cells. Several vector elements are desirable: a promoter with a down-stream cloning site for minigene insertion; a polyadenylation signal for efficient transcription termination; an E. coli origin of replication; and an E. coli selectable marker (e.g. ampicillin or kanamycin resistance). Numerous promoters can be used for this purpose, e.g., the human cytomegalovirus (hCMV) promoter. See, e.g., U.S. Pat. Nos. 5,580,859 and 5,589,466 for other suitable promoter sequences.

[0449] Additional vector modifications may be desired to optimize minigene expression and immunogenicity. In some cases, introns are required for efficient gene expression, and one or more synthetic or naturally-occurring introns could be incorporated into the transcribed region of the minigene. The inclusion of mRNA stabilization sequences and sequences for replication in mammalian cells may also be considered for increasing minigene expression.

[0450] Once an expression vector is selected, the minigene is cloned into the polylinker region downstream of the promoter. This plasmid is transformed into an appropriate E. coli strain, and DNA is prepared using standard techniques. The orientation and DNA sequence of the minigene, as well as all other elements included in the vector, are confirmed using restriction mapping and DNA sequence analysis. Bacterial cells harboring the correct plasmid can be stored as a master cell bank and a working cell bank.

[0451] In addition, immunostimulatory sequences (ISSs or CpGs) appear to play a role in the immunogenicity of DNA vaccines. These sequences may be included in the vector, outside the minigene coding sequence, if desired to enhance immunogenicity.

[0452] In some embodiments, a bi-cistronic expression vector which allows production of both the minigene-encoded epitopes and a second protein (included to enhance or decrease immunogenicity) can be used. Examples of proteins or polypeptides that could beneficially enhance the immune response if co-expressed include cytokines (e.g., IL-2, IL-12, GM-CSF), cytokine-inducing molecules (e.g., LeIF), costimulatory molecules, or for HTL responses, pan-DR binding proteins (PADRET™, Epimmune, San Diego, Calif.). Helper (HTL) epitopes can be joined to intracellular targeting signals and expressed separately from expressed CTL epitopes; this allows direction of the HTL epitopes to a cell compartment different than that of the CTL epitopes. If required, this could facilitate more efficient entry of HTL epitopes into the HLA class II pathway, thereby improving HTL induction. In contrast to HTL or CTL induction, specifically decreasing the immune response by co-expression of immunosuppressive molecules (e.g. TGF-β) may be beneficial in certain diseases.

[0453] Therapeutic quantities of plasmid DNA can be produced for example, by fermentation in E. coli, followed by purification. Aliquots from the working cell bank are used to inoculate growth medium, and grown to saturation in shaker flasks or a bioreactor according to well-known techniques. Plasmid DNA can be purified using standard bioseparation technologies such as solid phase anion-exchange resins supplied by QIAGEN, Inc. (Valencia, Calif.). If required, supercoiled DNA can be isolated from the open circular and linear forms using gel electrophoresis or other methods.

[0454] Purified plasmid DNA can be prepared for injection using a variety of formulations. The simplest of these is reconstitution of lyophilized DNA in sterile phosphate-buffer saline (PBS). This approach, known as “naked DNA,” is currently being used for intramuscular (IM) administration in clinical trials. To maximize the immunotherapeutic effects of minigene DNA vaccines, an alternative method for formulating purified plasmid DNA may be desirable. A variety of methods have been described, and new techniques may become available. Cationic lipids, glycolipids, and fusogenic liposomes can also be used in the formulation (see, e.g., as described by WO 93/24640; Mannino & Gould-Fogerite, Bio Techniques 6(7): 682 (1988); U.S. Pat. No. 5,279,833; WO 91/06309; and Felgner, et al., Proc. Nat'l. Acad. Sci. USA 84:7413 (1987). In addition, peptides and compounds referred to collectively as protective, interactive, non-condensing compounds (PINC) could also be complexed to purified plasmid DNA to influence variables such as stability, intramuscular dispersion, or trafficking to specific organs or cell types.

[0455] Target cell sensitization can be used as a functional assay for expression and HLA class I presentation of minigene-encoded CTL epitopes. For example, the plasmid DNA is introduced into a mammalian cell line that is suitable as a target for standard CTL chromium release assays. The transfection method used will be dependent on the final formulation. Electroporation can be used for “naked” DNA, whereas cationic lipids allow direct in vitro transfection. A plasmid expressing green fluorescent protein (GFP) can be co-transfected to allow enrichment of transfected cells using fluorescence activated cell sorting (FACS). These cells are then chromium-51 (⁵¹Cr) labeled and used as target cells for epitope-specific CTL lines; cytolysis, detected by ⁵¹Cr release, indicates both production of, and HLA presentation of, minigene-encoded CTL epitopes. Expression of HTL epitopes may be evaluated in an analogous manner using assays to assess HTL activity.

[0456] In vivo immunogenicity is a second approach for functional testing of minigene DNA formulations. Transgenic mice expressing appropriate human HLA proteins are immunized with the DNA product. The dose and route of administration are formulation dependent (e.g., IM for DNA in PBS, intraperitoneal (i.p.) for lipid-complexed DNA). Twenty-one days after immunization, splenocytes are harvested and restimulated for one week in the presence of peptides encoding each epitope being tested. Thereafter, for CTL effector cells, assays are conducted for cytolysis of peptide-loaded, ⁵¹Cr-labeled target cells using standard techniques. Lysis of target cells that were sensitized by HLA loaded with peptide epitopes, corresponding to minigene-encoded epitopes, demonstrates DNA vaccine function for in vivo induction of CTLs. Immunogenicity of HTL epitopes is confirmed in transgenic mice in an analogous manner.

[0457] Alternatively, the nucleic acids can be administered using ballistic delivery as described, for instance, in U.S. Pat. No. 5,204,253. Using this technique, particles comprised solely of DNA are administered. In a further alternative embodiment, DNA can be adhered to particles, such as gold particles.

[0458] Minigenes can also be delivered using other bacterial or viral delivery systems well known in the art, e.g., an expression construct encoding epitopes of the invention can be incorporated into a viral vector such as vaccinia.

[0459] X.C.2. Combinations of CTL Peptides with Helper Peptides

[0460] Vaccine compositions comprising CTL peptides of the invention can be modified, e.g., analoged, to provide desired attributes, such as improved serum half life, broadened population coverage or enhanced immunogenicity.

[0461] For instance, the ability of a peptide to induce CTL activity can be enhanced by linking the peptide to a sequence which contains at least one epitope that is capable of inducing a T helper cell response. Although a CTL peptide can be directly linked to a T helper peptide, often CTL epitope/HTL epitope conjugates are linked by a spacer molecule. The spacer is typically comprised of relatively small, neutral molecules, such as amino acids or amino acid mimetics, which are substantially uncharged under physiological conditions. The spacers are typically selected from, e.g., Ala, Gly, or other neutral spacers of nonpolar amino acids or neutral polar amino acids. It will be understood that the optionally present spacer need not be comprised of the same residues and thus may be a hetero- or homo-oligomer. When present, the spacer will usually be at least one or two residues, more usually three to six residues and sometimes 10 or more residues. The CTL peptide epitope can be linked to the T helper peptide epitope either directly or via a spacer either at the amino or carboxy terminus of the CTL peptide. The amino terminus of either the immunogenic peptide or the T helper peptide may be acylated.

[0462] In certain embodiments, the T helper peptide is one that is recognized by T helper cells present in a majority of a genetically diverse population. This can be accomplished by selecting peptides that bind to many, most, or all of the HLA class II molecules. Examples of such amino acid bind many HLA Class II molecules include sequences from antigens such as tetanus toxoid at positions 830-843 (QYIKANSKFIGITE; SEQ ID NO:1), Plasmodium falciparum circumsporozoite (CS) protein at positions 378-398 (DIEKKIAKMEKASSVFNWNS; SEQ ID NO:2), and Streptococcus 18kD protein at positions 116-131 (GAVDSILGGVATYGAA; SEQ ID NO:3). Other examples include peptides bearing a DR 1-4-7 supermotif, or either of the DR3 motifs.

[0463] Alternatively, it is possible to prepare synthetic peptides capable of stimulating T helper lymphocytes, in a loosely HLA-restricted fashion, using amino acid sequences not found in nature (see, e.g., PCT publication WO 95/07707). These synthetic compounds called Pan-DR-binding epitopes (e.g., PADRE™, Epimmune, Inc., San Diego, Calif.) are designed, most preferably, to bind most HLA-DR (human HLA class II) molecules. For instance, a pan-DR-binding epitope peptide having the formula: aKXVAAWTLKAa (SEQ ID NO:4), where “X” is either cyclohexylalanine, phenylalanine, or tyrosine, and a is either D-alanine or L-alanine, has been found to bind to most HLA-DR alleles, and to stimulate the response of T helper lymphocytes from most individuals, regardless of their HLA type. An alternative of a pan-DR binding epitope comprises all “L” natural amino acids and can be provided in the form of nucleic acids that encode the epitope.

[0464] HTL peptide epitopes can also be modified to alter their biological properties. For example, they can be modified to include D-amino acids to increase their resistance to proteases and thus extend their serum half life, or they can be conjugated to other molecules such as lipids, proteins, carbohydrates, and the like to increase their biological activity. For example, a T helper peptide can be conjugated to one or more palmitic acid chains at either the amino or carboxyl termini.

[0465] X.C.3. Combinations of CTL Peptides with T Cell Priming Agents

[0466] In some embodiments it may be desirable to include in the pharmaceutical compositions of the invention at least one component which primes B lymphocytes or T lymphocytes. Lipids have been identified as agents capable of priming CTL in vivo. For example, palmitic acid residues can be attached to the ε- and α-amino groups of a lysine residue and then linked, e.g., via one or more linking residues such as Gly, Gly-Gly-, Ser, Ser-Ser, or the like, to an immunogenic peptide. The lipidated peptide can then be administered either directly in a micelle or particle, incorporated into a liposome, or emulsified in an adjuvant, e.g., incomplete Freund's adjuvant. In a preferred embodiment, a particularly effective immunogenic composition comprises palmitic acid attached to ε- and α-amino groups of Lys, which is attached via linkage, e.g., Ser-Ser, to the amino terminus of the immunogenic peptide.

[0467] As another example of lipid priming of CTL responses, E. coli lipoproteins, such as tripalmitoyl-S-glycerylcysteinlyseryl-serine (P₃CSS) can be used to prime virus specific CTL when covalently attached to an appropriate peptide (see, e.g., Deres, et al., Nature 342:561, 1989). Peptides of the invention can be coupled to P₃CSS, for example, and the lipopeptide administered to an individual to prime specifically an immune response to the target antigen. Moreover, because the induction of neutralizing antibodies can also be primed with P₃CSS-conjugated epitopes, two such compositions can be combined to more effectively elicit both humoral and cell-mediated responses.

[0468] X.C.4. Vaccine Compositions Comprising DC Pulsed with CTL and/or HTL Peptides

[0469] An embodiment of a vaccine composition in accordance with the invention comprises ex vivo administration of a cocktail of epitope-bearing peptides to PBMC, or isolated DC therefrom, from the patient's blood. A pharmaceutical to facilitate harvesting of DC can be used, such as Progenipoietin™ (Pharmacia-Monsanto, St. Louis, Mo.) or GM-CSF/IL-4. After pulsing the DC with peptides and prior to reinfusion into patients, the DC are washed to remove unbound peptides. In this embodiment, a vaccine comprises peptide-pulsed DCs which present the pulsed peptide epitopes complexed with HLA molecules on their surfaces.

[0470] The DC can be pulsed ex vivo with a cocktail of peptides, some of which stimulate CTL responses to PSCA. Optionally, a helper T cell (HTL) peptide, such as a natural or artificial loosely restricted HLA Class II peptide, can be included to facilitate the CTL response. Thus, a vaccine in accordance with the invention is used to treat a cancer which expresses or overexpresses PSCA.

[0471] X.D. Adoptive Immunotherapy

[0472] Antgenic PSCA-related peptides are used to elicit a CTL and/or HTL response ex vivo, as well. The resulting CTL or HTL cells, can be used to treat tumors in patients that do not respond to other conventional forms of therapy, or will not respond to a therapeutic vaccine peptide or nucleic acid in accordance with the invention. Ex vivo CTL or HTL responses to a particular antigen are induced by incubating in tissue culture the patient's, or genetically compatible, CTL or HTL precursor cells together with a source of antigen-presenting cells (APC), such as dendritic cells, and the appropriate immunogenic peptide. After an appropriate incubation time (typically about 7-28 days), in which the precursor cells are activated and expanded into effector cells, the cells are infused back into the patient, where they will destroy (CTL) or facilitate destruction (HTL) of their specific target cell (e.g., a tumor cell). Transfected dendritic cells may also be used as antigen presenting cells.

[0473] X.E. Administration of Vaccines for Therapeutic or Prophylactic Purposes

[0474] Pharmaceutical and vaccine compositions of the invention are typically used to treat and/or prevent a cancer that expresses or overexpresses PSCA. In therapeutic applications, peptide and/or nucleic acid compositions are administered to a patient in an amount sufficient to elicit an effective B cell, CTL and/or HTL response to the antigen and to cure or at least partially arrest or slow symptoms and/or complications. An amount adequate to accomplish this is defined as “therapeutically effective dose.” Amounts effective for this use will depend on, e.g., the particular composition administered, the manner of administration, the stage and severity of the disease being treated, the weight and general state of health of the patient, and the judgment of the prescribing physician.

[0475] For pharmaceutical compositions, the immunogenic peptides of the invention, or DNA encoding them, are generally administered to an individual already bearing a tumor that expresses PSCA. The peptides or DNA encoding them can be administered individually or as fusions of one or more peptide sequences. Patients can be treated with the immunogenic peptides separately or in conjunction with other treatments, such as surgery, as appropriate.

[0476] For therapeutic use, administration should generally begin at the first diagnosis of PSCA-associated cancer. This is followed by boosting doses until at least symptoms are substantially abated and for a period thereafter. The embodiment of the vaccine composition (i.e., including, but not limited to embodiments such as peptide cocktails, polyepitopic polypeptides, minigenes, or TAA-specific CTLs or pulsed dendritic cells) delivered to the patient may vary according to the stage of the disease or the patient's health status. For example, in a patient with a tumor that expresses PSCA, a vaccine comprising PSCA-specific CTL may be more efficacious in killing tumor cells in patient with advanced disease than alternative embodiments.

[0477] It is generally important to provide an amount of the peptide epitope delivered by a mode of administration sufficient to stimulate effectively a cytotoxic T cell response; compositions which stimulate helper T cell responses can also be given in accordance with this embodiment of the invention.

[0478] The dosage for an initial therapeutic immunization generally occurs in a unit dosage range where the lower value is about 1, 5, 50, 500, or 1,000 μg and the higher value is about 10,000; 20,000; 30,000; or 50,000 μg. Dosage values for a human typically range from about 500 μg to about 50,000 μg per 70 kilogram patient. Boosting dosages of between about 1.0 μg to about 50,000 μg of peptide pursuant to a boosting regimen over weeks to months may be administered depending upon the patient's response and condition as determined by measuring the specific activity of CTL and HTL obtained from the patient's blood. Administration should continue until at least clinical symptoms or laboratory tests indicate that the neoplasia, has been eliminated or reduced and for a period thereafter. The dosages, routes of administration, and dose schedules are adjusted in accordance with methodologies known in the art.

[0479] In certain embodiments, the peptides and compositions of the present invention are employed in serious disease states, that is, life-threatening or potentially life threatening situations. In such cases, as a result of the minimal amounts of extraneous substances and the relative nontoxic nature of the peptides in preferred compositions of the invention, it is possible and may be felt desirable by the treating physician to administer substantial excesses of these peptide compositions relative to these stated dosage amounts.

[0480] The vaccine compositions of the invention can also be used purely as prophylactic agents. Generally the dosage for an initial prophylactic immunization generally occurs in a unit dosage range where the lower value is about 1, 5, 50, 500, or 1000 μg and the higher value is about 10,000; 20,000; 30,000; or 50,000 μg. Dosage values for a human typically range from about 500 μg to about 50,000 μg per 70 kilogram patient. This is followed by boosting dosages of between about 1.0 μg to about 50,000 μg of peptide administered at defined intervals from about four weeks to six months after the initial administration of vaccine. The immunogenicity of the vaccine can be assessed by measuring the specific activity of CTL and HTL obtained from a sample of the patient's blood.

[0481] The pharmaceutical compositions for therapeutic treatment are intended for parenteral, topical, oral, nasal, intrathecal, or local (e.g. as a cream or topical ointment) administration. Preferably, the pharmaceutical compositions are administered parentally, e.g., intravenously, subcutaneously, intradermally, or intramuscularly. Thus, the invention provides compositions for parenteral administration which comprise a solution of the immunogenic peptides dissolved or suspended in an acceptable carrier, preferably an aqueous carrier.

[0482] A variety of aqueous carriers may be used, e.g., water, buffered water, 0.8% saline, 0.3% glycine, hyaluronic acid and the like. These compositions may be sterilized by conventional, well-known sterilization techniques, or may be sterile filtered. The resulting aqueous solutions may be packaged for use as is, or lyophilized, the lyophilized preparation being combined with a sterile solution prior to administration.

[0483] The compositions may contain pharmaceutically acceptable auxiliary substances as required to approximate physiological conditions, such as pH-adjusting and buffering agents, tonicity adjusting agents, wetting agents, preservatives, and the like, for example, sodium acetate, sodium lactate, sodium chloride, potassium chloride, calcium chloride, sorbitan monolaurate, triethanolamine oleate, etc.

[0484] The concentration of peptides of the invention in the pharmaceutical formulations can vary widely, i.e., from less than about 0.1%, usually at or at least about 2% to as much as 20% to 50% or more by weight, and will be selected primarily by fluid volumes, viscosities, etc., in accordance with the particular mode of administration selected.

[0485] A human unit dose form of a composition is typically included in a pharmaceutical composition that comprises a human unit dose of an acceptable carrier, in one embodiment an aqueous carrier, and is administered in a volume/quantity that is known by those of skill in the art to be used for administration of such compositions to humans (see, e.g., Remington's Pharmaceutical Sciences, 17^{th} Edition, A. Gennaro, Editor, Mack Publishing Co., Easton, Pa., 1985). For example a peptide dose for initial immunization can be from about 1 to about 50,000 μg, generally 100-5,000 μg, for a 70 kg patient. For example, for nucleic acids an initial immunization may be performed using an expression vector in the form of naked nucleic acid administered IM (or SC or ID) in the amounts of 0.5-5 mg at multiple sites. The nucleic acid (0.1 to 1000 μg) can also be administered using a gene gun. Following an incubation period of 3-4 weeks, a booster dose is then administered. The booster can be recombinant fowlpox virus administered at a dose of 5-10⁷ to 5×10⁹ pfu.

[0486] For antibodies, a treatment generally involves repeated administration of the anti-PSCA antibody preparation, via an acceptable route of administration such as intravenous injection (IV), typically at a dose in the range of about 0.1 to about 10 mg/kg body weight. In general, doses in the range of 10-500 mg mAb per week are effective and well tolerated. Moreover, an initial loading dose of approximately 4 mg/kg patient body weight IV, followed by weekly doses of about 2 mg/kg IV of the anti-PSCA mAb preparation represents an acceptable dosing regimen. As appreciated by those of skill in the art, various factors can influence the ideal dose in a particular case. Such factors include, for example, half life of a composition, the binding affinity of an Ab, the immunogenicity of a substance, the degree of PSCA expression in the patient, the extent of circulating shed PSCA antigen, the desired steady-state concentration level, frequency of treatment, and the influence of chemotherapeutic or other agents used in combination with the treatment method of the invention, as well as the health status of a particular patient. Non-limiting preferred human unit doses are, for example, 500 μg-1 mg, 1 mg-50 mg, 50 mg-100 mg, 100 mg -200 mg, 200 mg -300 mg, 400 mg-500 mg, 500 mg-600 mg, 600 mg-700 mg, 700 mg-800 mg, 800 mg-900 mg, 900 mg-1 g, or 1 mg-700 mg. In certain embodiments, the dose is in a range of 2-5 mg/kg body weight, e.g., with follow on weekly doses of 1-3 mg/kg; 0.5 mg, 1, 2, 3, 4, 5, 6, 7, 8, 9, 10 mg/kg body weight followed, e.g., in two, three or four weeks by weekly doses; 0.5-10 mg/kg body weight, e.g., followed in two, three or four weeks by weekly doses; 225, 250, 275, 300, 325, 350, 375, 400 mg m² of body area weekly; 1-600 mg m² of body area weekly; 225-400 mg m² of body area weekly; these does can be followed by weekly doses for 2, 3, 4, 5, 6, 7, 8, 9, 19, 11, 12 or more weeks.

[0487] In one embodiment, human unit dose forms of polynucleotides comprise a suitable dosage range or effective amount that provides any therapeutic effect. As appreciated by one of ordinary skill in the art a therapeutic effect depends on a number of factors, including the sequence of the polynucleotide, molecular weight of the polynucleotide and route of administration. Dosages are generally selected by the physician or other health care professional in accordance with a variety of parameters known in the art, such as severity of symptoms, history of the patient and the like. Generally, for a polynucleotide of about 20 bases, a dosage range may be selected from, for example, an independently selected lower limit such as about 0.1, 0.25, 0.5, 1, 2, 5, 10, 20, 30, 40, 50, 60, 70, 80, 90, 100, 200, 300, 400 or 500 mg/kg up to an independently selected upper limit, greater than the lower limit, of about 60, 80, 100, 200, 300, 400, 500, 750, 1000, 1500, 2000, 3000, 4000, 5000, 6000, 7000, 8000, 9000 or 10,000 mg/kg. For example, a dose may be about any of the following: 0.1 to 100 mg/kg, 0.1 to 50 mg/kg, 0.1 to 25 mg/kg, 0.1 to 10 mg/kg, 1 to 500 mg/kg, 100 to 400 mg/kg, 200 to 300 mg/kg, 1 to 100 mg/kg, 100 to 200 mg/kg, 300 to 400 mg/kg, 400 to 500 mg/kg, 500 to 1000 mg/kg, 500 to 5000 mg/kg, or 500 to 10,000 mg/kg. Generally, parenteral routes of administration may require higher doses of polynucleotide compared to more direct application to the nucleotide to diseased tissue, as do polynucleotides of increasing length.

[0488] In one embodiment, human unit dose forms of T-cells comprise a suitable dosage range or effective amount that provides any therapeutic effect. As appreciated by one of ordinary skill in the art, a therapeutic effect depends on a number of factors. Dosages are generally selected by the physician or other health care professional in accordance with a variety of parameters known in the art, such as severity of symptoms, history of the patient and the like. A dose may be about 10⁴ cells to about 10⁶ cells, about 10⁶ cells to about 10⁸ cells, about 10⁸ to about 10¹¹ cells, or about 10⁸ to about 5×10¹⁰ cells. A dose may also about 10⁶ cells/m² to about 10¹⁰ cells/m², or about 10⁶ cells/m² to about 10⁸ cells/m².

[0489] Proteins(s) of the invention, and/or nucleic acids encoding the protein(s), can also be administered via liposomes, which may also serve to: 1) target the proteins(s) to a particular tissue, such as lymphoid tissue; 2) to target selectively to diseases cells; or, 3) to increase the half-life of the peptide composition. Liposomes include emulsions, foams, micelles, insoluble monolayers, liquid crystals, phospholipid dispersions, lamellar layers and the like. In these preparations, the peptide to be delivered is incorporated as part of a liposome, alone or in conjunction with a molecule which binds to a receptor prevalent among lymphoid cells, such as monoclonal antibodies which bind to the CD45 antigen, or with other therapeutic or immunogenic compositions. Thus, liposomes either filled or decorated with a desired peptide of the invention can be directed to the site of lymphoid cells, where the liposomes then deliver the peptide compositions. Liposomes for use in accordance with the invention are formed from standard vesicle-forming lipids, which generally include neutral and negatively charged phospholipids and a sterol, such as cholesterol. The selection of lipids is generally guided by consideration of, e.g., liposome size, acid lability and stability of the liposomes in the blood stream. A variety of methods are available for preparing liposomes, as described in, e.g., Szoka, et al., Ann. Rev. Biophys. Bioeng. 9:467 (1980), and U.S. Pat. Nos. 4,235,871, 4,501,728, 4,837,028, and 5,019,369.

[0490] For targeting cells of the immune system, a ligand to be incorporated into the liposome can include, e.g., antibodies or fragments thereof specific for cell surface determinants of the desired immune system cells. A liposome suspension containing a peptide may be administered intravenously, locally, topically, etc. in a dose which varies according to, inter alia, the manner of administration, the peptide being delivered, and the stage of the disease being treated.

[0491] For solid compositions, conventional nontoxic solid carriers may be used which include, for example, pharmaceutical grades of mannitol, lactose, starch, magnesium stearate, sodium saccharin, talcum, cellulose, glucose, sucrose, magnesium carbonate, and the like. For oral administration, a pharmaceutically acceptable nontoxic composition is formed by incorporating any of the normally employed excipients, such as those carriers previously listed, and generally 10-95% of active ingredient, that is, one or more peptides of the invention, and more preferably at a concentration of 25%-75%.

[0492] For aerosol administration, immunogenic peptides are preferably supplied in finely divided form along with a surfactant and propellant. Typical percentages of peptides are about 0.01%-20% by weight, preferably about 1%-10%. The surfactant must, of course, be nontoxic, and preferably soluble in the propellant. Representative of such agents are the esters or partial esters of fatty acids containing from about 6 to 22 carbon atoms, such as caproic, octanoic, lauric, palmitic, stearic, linoleic, linolenic, olesteric and oleic acids with an aliphatic polyhydric alcohol or its cyclic anhydride. Mixed esters, such as mixed or natural glycerides may be employed. The surfactant may constitute about 0.1%-20% by weight of the composition, preferably about 0.25-5%. The balance of the composition is ordinarily propellant. A carrier can also be included, as desired, as with, e.g., lecithin for intranasal delivery.

[0493] XI.) Diaqnostic and Proqnostic Embodiments of PSCA.

[0494] As disclosed herein, PSCA polynucleotides, polypeptides, reactive cytotoxic T cells (CTL), reactive helper T cells (HTL) and anti-polypeptide antibodies are used in well known diagnostic, prognostic and therapeutic assays that examine conditions associated with dysregulated cell growth such as cancer, in particular the cancers listed in Table I (see, e.g., both its specific pattern of tissue expression as well as its overexpression in certain cancers as described for example in the Example entitled “Expression analysis of PSCA in normal tissues, and patient specimens”).

[0495] PSCA can be analogized to a prostate associated antigen PSA, the archetypal marker that has been used by medical practitioners for years to identify and monitor the presence of prostate cancer (see, e.g., Merrill et al., J. Urol. 163(2): 503-5120 (2000); Polascik et al, J. Urol. Aug; 162(2):293-306 (1999) and Fortier et al., J. Nat. Cancer Inst. 91(19): 1635-1640(1999)). A variety of other diagnostic markers are also used in similar contexts including p53 and K-ras (see, e.g., Tulchinsky et al., Int J Mol Med 1999 July 4(1):99-102 and Minimoto et al., Cancer Detect Prev 2000;24(1):1-12). Therefore, this disclosure of PSCA polynucleotides and polypeptides (as well as PSCA polynucleotide probes and anti-PSCA antibodies used to identify the presence of these molecules) and their properties allows skilled artisans to utilize these molecules in methods that are analogous to those used, for example, in a variety of diagnostic assays directed to examining conditions associated with cancer.

[0496] Typical embodiments of diagnostic methods which utilize the PSCA polynucleotides, polypeptides, reactive T cells and antibodies are analogous to those methods from well-established diagnostic assays, which employ, e.g., PSA polynucleotides, polypeptides, reactive T cells and antibodies. For example, just as PSA polynucleotides are used as probes (for example in Northern analysis, see, e.g., Sharief et al, Biochem. Mol. Biol. Int. 33(3):567-74(1994)) and primers (for example in PCR analysis, see, e.g., Okegawa et al., J. Urol. 163(4): 1189-1190 (2000)) to observe the presence and/or the level of PSA mRNAs in methods of monitoring PSA overexpression or the metastasis of prostate cancers, the PSCA polynucleotides described herein can be utilized in the same way to detect PSCA overexpression or the metastasis of prostate and other cancers expressing this gene. Alternatively, just as PSA polypeptides are used to generate antibodies specific for PSA which can then be used to observe the presence and/or the level of PSA proteins in methods to monitor PSA protein overexpression (see, e.g., Stephan et al, Urology 55(4):560-3 (2000)) or the metastasis of prostate cells (see, e.g., Alanen et al., Pathol. Res. Pract. 192(3):233-7 (1996)), the PSCA polypeptides described herein can be utilized to generate for use in detecting PSCA overexpression or the metastasis of prostate cells and cells of other cancers expressing this gene.

[0497] Specifically, because metastases involves the movement of cancer cells from an organ of origin (such as the lung or prostate gland etc.) to a different area of the body (such as a lymph node), assays which examine a biological sample for the presence of cells expressing PSCA polynucleotides and/or polypeptides can be used to provide evidence of metastasis. For example, when a biological sample from tissue that does not normally contain PSCA-expressing cells (lymph node) is found to contain PSCA-expressing cells such as the PSCA expression seen in LAPC4 and LAPC9, xenografts isolated from lymph node and bone metastasis, respectively, this finding is indicative of metastasis.

[0498] Alternatively PSCA polynucleotides and/or polypeptides can be used to provide evidence of cancer, for example, when cells in a biological sample that do not normally express PSCA or express PSCA at a different level are found to express PSCA or have an increased expression of PSCA (see, e.g., the PSCA expression in the cancers listed in Table I and in patient samples etc. shown in the accompanying Figures). In such assays, artisans may further wish to generate supplementary evidence of metastasis by testing the biological sample for the presence of a second tissue restricted marker (in addition to PSCA) such as PSA, PSCA etc. (see, e.g., Alanen et al., Pathol. Res. Pract. 192(3): 233-237 (1996)).

[0499] The use of immunohistochemistry to identify the presence of a PSCA polypeptide within a tissue section can indicate an altered state of certain cells within that tissue. It is well understood in the art that the ability of an antibody to localize to a polypeptide that is expressed in cancer cells is a way of diagnosing presence of disease, disease stage, progression and/or tumor aggressiveness. Such an antibody can also detect an altered distribution of the polypeptide within the cancer cells, as compared to corresponding non-malignant tissue.

[0500] The PSCA polypeptide and immunogenic compositions are also useful in view of the phenomena of altered subcellular protein localization in disease states. Alteration of cells from normal to diseased state causes changes in cellular morphology and is often associated with changes in subcellular protein localization/distribution. For example, cell membrane proteins that are expressed in a polarized manner in normal cells can be altered in disease, resulting in distribution of the protein in a non-polar manner over the whole cell surface.

[0501] The phenomenon of altered subcellular protein localization in a disease state has been demonstrated with MUC1 and Her2 protein expression by use of immunohistochemical means. Normal epithelial cells have a typical apical distribution of MUC1, in addition to some supranuclear localization of the glycoprotein, whereas malignant lesions often demonstrate an apolar staining pattern (Diaz et al, The Breast Journal, 7; 40-45 (2001); Zhang et al, Clinical Cancer Research, 4; 2669-2676 (1998): Cao, et al, The Journal of Histochemistry and Cytochemistry, 45: 1547-1557 (1997)). In addition, normal breast epithelium is either negative for Her2 protein or exhibits only a basolateral distribution whereas malignant cells can express the protein over the whole cell surface (De Potter, et al, International Journal of Cancer, 44; 969-974 (1989): McCormick, et al, 117; 935-943 (2002)). Alternatively, distribution of the protein may be altered from a surface only localization to include diffuse cytoplasmic expression in the diseased state. Such an example can be seen with MUC1 (Diaz, et al, The Breast Journal, 7: 40-45 (2001)).

[0502] Alteration in the localization/distribution of a protein in the cell, as detected by immunohistochemical methods, can also provide valuable information concerning the favorability of certain treatment modalities. This last point is illustrated by a situation where a protein may be intracellular in normal tissue, but cell surface in malignant cells; the cell surface location makes the cells favorably amenable to antibody-based diagnostic and treatment regimens. When such an alteration of protein localization occurs for PSCA, the PSCA protein and immune responses related thereto are very useful. Accordingly, the ability to determine whether alteration of subcellular protein localization occurred for 24P4C12 make the PSCA protein and immune responses related thereto very useful. Use of the PSCA compositions allows those skilled in the art to make important diagnostic and therapeutic decisions.

[0503] Immunohistochemical reagents specific to PSCA are also useful to detect metastases of tumors expressing PSCA when the polypeptide appears in tissues where PSCA is not normally produced.

[0504] Thus, PSCA polypeptides and antibodies resulting from immune responses thereto are useful in a variety of important contexts such as diagnostic, prognostic, preventative and/or therapeutic purposes known to those skilled in the art.

[0505] Just as PSA polynucleotide fragments and polynucleotide variants are employed by skilled artisans for use in methods of monitoring PSA, PSCA polynucleotide fragments and polynucleotide variants are used in an analogous manner. In particular, typical PSA polynucleotides used in methods of monitoring PSA are probes or primers which consist of fragments of the PSA cDNA sequence. Illustrating this, primers used to PCR amplify a PSA polynucleotide must include less than the whole PSA sequence to function in the polymerase chain reaction. In the context of such PCR reactions, skilled artisans generally create a variety of different polynucleotide fragments that can be used as primers in order to amplify different portions of a polynucleotide of interest or to optimize amplification reactions (see, e.g., Caetano-Anolies, G. Biotechniques 25(3): 472-476, 478-480 (1998); Robertson et al., Methods Mol. Biol. 98:121-154 (1998)). An additional illustration of the use of such fragments is provided in the Example entitled “Expression analysis of PSCA in normal tissues, and patient specimens,” where a PSCA polynucleotide fragment is used as a probe to show the expression of PSCA RNAs in cancer cells. In addition, variant polynucleotide sequences are typically used as primers and probes for the corresponding mRNAs in PCR and Northern analyses (see, e.g., Sawai et al., Fetal Diagn. Ther. 1996 November-December 11(6):407-13 and Current Protocols In Molecular Biology, Volume 2, Unit 2, Frederick M. Ausubel et al. eds., 1995)). Polynucleotide fragments and variants are useful in this context where they are capable of binding to a target polynucleotide sequence (e.g., a PSCA polynucleotide shown in FIG. 2 or variant thereof) under conditions of high stringency.

[0506] Furthermore, PSA polypeptides which contain an epitope that can be recognized by an antibody or T cell that specifically binds to that epitope are used in methods of monitoring PSA. PSCA polypeptide fragments and polypeptide analogs or variants can also be used in an analogous manner. This practice of using polypeptide fragments or polypeptide variants to generate antibodies (such as anti-PSA antibodies or T cells) is typical in the art with a wide variety of systems such as fusion proteins being used by practitioners (see, e.g., Current Protocols In Molecular Biology, Volume 2, Unit 16, Frederick M. Ausubel et al. eds., 1995). In this context, each epitope(s) functions to provide the architecture with which an antibody or T cell is reactive. Typically, skilled artisans create a variety of different polypeptide fragments that can be used in order to generate immune responses specific for different portions of a polypeptide of interest (see, e.g., U.S. Pat. No. 5,840,501 and U.S. Pat. No. 5,939,533). For example it may be preferable to utilize a polypeptide comprising one of the PSCA biological motifs discussed herein or a motif-bearing subsequence which is readily identified by one of skill in the art based on motifs available in the art. Polypeptide fragments, variants or analogs are typically useful in this context as long as they comprise an epitope capable of generating an antibody or T cell specific for a target polypeptide sequence (e.g. a PSCA polypeptide shown in FIG. 3).

[0507] As shown herein, the PSCA polynucleotides and polypeptides (as well as the PSCA polynucleotide probes and anti-PSCA antibodies or T cells used to identify the presence of these molecules) exhibit specific properties that make them useful in diagnosing cancers such as those listed in Table I. Diagnostic assays that measure the presence of PSCA gene products, in order to evaluate the presence or onset of a disease condition described herein, such as prostate cancer, are used to identify patients for preventive measures or further monitoring, as has been done so successfully with PSA. Moreover, these materials satisfy a need in the art for molecules having similar or complementary characteristics to PSA in situations where, for example, a definite diagnosis of metastasis of prostatic origin cannot be made on the basis of a test for PSA alone (see, e.g., Alanen et al., Pathol. Res. Pract. 192(3): 233-237 (1996)), and consequently, materials such as PSCA polynucleotides and polypeptides (as well as the PSCA polynucleotide probes and anti-PSCA antibodies used to identify the presence of these molecules) need to be employed to confirm a metastases of prostatic origin.

[0508] Finally, in addition to their use in diagnostic assays, the PSCA polynucleotides disclosed herein have a number of other utilities such as their use in the identification of oncogenetic associated chromosomal abnormalities in the chromosomal region to which the PSCA gene maps (see the Example entitled “Chromosomal Mapping of PSCA” below). Moreover, in addition to their use in diagnostic assays, the PSCA-related proteins and polynucleotides disclosed herein have other utilities such as their use in the forensic analysis of tissues of unknown origin (see, e.g., Takahama K Forensic Sci Int Jun. 28, 1996;80(1-2): 63-9).

[0509] Additionally, PSCA-related proteins or polynucleotides of the invention can be used to treat a pathologic condition characterized by the over-expression of PSCA. For example, the amino acid or nucleic acid sequence of FIG. 2 or FIG. 3, or fragments of either, can be used to generate an immune response to a PSCA antigen. Antibodies or other molecules that react with PSCA can be used to modulate the function of this molecule, and thereby provide a therapeutic benefit.

[0510] XII.) Inhibition of PSCA Protein Function

[0511] The invention includes various methods and compositions for inhibiting the binding of PSCA to its binding partner or its association with other protein(s) as well as methods for inhibiting PSCA function.

[0512] XII.A.) Inhibition of PSCA with Intracellular Antibodies

[0513] In one approach, a recombinant vector that encodes single chain antibodies that specifically bind to PSCA are introduced into PSCA expressing cells via gene transfer technologies. Accordingly, the encoded single chain anti-PSCA antibody is expressed intracellularly, binds to PSCA protein, and thereby inhibits its function. Methods for engineering such intracellular single chain antibodies are well known. Such intracellular antibodies, also known as “intrabodies”, are specifically targeted to a particular compartment within the cell, providing control over where the inhibitory activity of the treatment is focused. This technology has been successfully applied in the art (for review, see Richardson and Marasco, 1995, TIBTECH vol. 13). Intrabodies have been shown to virtually eliminate the expression of otherwise abundant cell surface receptors (see, e.g., Richardson et al, 1995, Proc. Natl. Acad. Sci. USA 92: 3137-3141; Beeri et al., 1994, J. Biol. Chem. 289: 23931-23936; Deshane et al., 1994, Gene Ther. 1: 332-337).

[0514] Single chain antibodies comprise the variable domains of the heavy and light chain joined by a flexible linker polypeptide, and are expressed as a single polypeptide. Optionally, single chain antibodies are expressed as a single chain variable region fragment joined to the light chain constant region. Well-known intracellular trafficking signals are engineered into recombinant polynucleotide vectors encoding such single chain antibodies in order to target precisely the intrabody to the desired intracellular compartment. For example, intrabodies targeted to the endoplasmic reticulum (ER) are engineered to incorporate a leader peptide and, optionally, a C-terminal ER retention signal, such as the KDEL amino acid motif. Intrabodies intended to exert activity in the nucleus are engineered to include a nuclear localization signal. Lipid moieties are joined to intrabodies in order to tether the intrabody to the cytosolic side of the plasma membrane. Intrabodies can also be targeted to exert function in the cytosol. For example, cytosolic intrabodies are used to sequester factors within the cytosol, thereby preventing them from being transported to their natural cellular destination.

[0515] In one embodiment, intrabodies are used to capture PSCA in the nucleus, thereby preventing its activity within the nucleus. Nuclear targeting signals are engineered into such PSCA intrabodies in order to achieve the desired targeting. Such PSCA intrabodies are designed to bind specifically to a particular PSCA domain. In another embodiment, cytosolic intrabodies that specifically bind to a PSCA protein are used to prevent PSCA from gaining access to the nucleus, thereby preventing it from exerting any biological activity within the nucleus (e.g., preventing PSCA from forming transcription complexes with other factors).

[0516] In order to specifically direct the expression of such intrabodies to particular cells, the transcription of the intrabody is placed under the regulatory control of an appropriate tumor-specific promoter and/or enhancer. In order to target intrabody expression specifically to prostate, for example, the PSA promoter and/or promoter/enhancer can be utilized (See, for example, U.S. Pat. No. 5,919,652 issued 6 Jul. 1999).

[0517] XII.B.) Inhibition of PSCA with Recombinant Proteins

[0518] In another approach, recombinant molecules bind to PSCA and thereby inhibit PSCA function. For example, these recombinant molecules prevent or inhibit PSCA from accessing/binding to its binding partner(s) or associating with other protein(s). Such recombinant molecules can, for example, contain the reactive part(s) of a PSCA specific antibody molecule. In a particular embodiment, the PSCA binding domain of a PSCA binding partner is engineered into a dimeric fusion protein, whereby the fusion protein comprises two PSCA ligand binding domains linked to the Fc portion of a human IgG, such as human IgG1. Such IgG portion can contain, for example, the C_{H}2 and C_{H}3 domains and the hinge region, but not the C_{H}1 domain. Such dimeric fusion proteins are administered in soluble form to patients suffering from a cancer associated with the expression of PSCA, whereby the dimeric fusion protein specifically binds to PSCA and blocks PSCA interaction with a binding partner. Such dimeric fusion proteins are further combined into multimeric proteins using known antibody linking technologies.

[0519] XII.C.) Inhibition of PSCA Transcription or Translation

[0520] The present invention also comprises various methods and compositions for inhibiting the transcription of the PSCA gene. Similarly, the invention also provides methods and compositions for inhibiting the translation of PSCA mRNA into protein.

[0521] In one approach, a method of inhibiting the transcription of the PSCA gene comprises contacting the PSCA gene with a PSCA antisense polynucleotide. In another approach, a method of inhibiting PSCA mRNA translation comprises contacting a PSCA mRNA with an antisense polynucleotide. In another approach, a PSCA specific ribozyme is used to cleave a PSCA message, thereby inhibiting translation. Such antisense and ribozyme based methods can also be directed to the regulatory regions of the PSCA gene, such as PSCA promoter and/or enhancer elements. Similarly, proteins capable of inhibiting a PSCA gene transcription factor are used to inhibit PSCA mRNA transcription. The various polynucleotides and compositions useful in the aforementioned methods have been described above. The use of antisense and ribozyme molecules to inhibit transcription and translation is well known in the art.

[0522] Other factors that inhibit the transcription of PSCA by interfering with PSCA transcriptional activation are also useful to treat cancers expressing PSCA. Similarly, factors that interfere with PSCA processing are useful to treat cancers that express PSCA. Cancer treatment methods utilizing such factors are also within the scope of the invention.

[0523] XII.D.) General Considerations for Therapeutic Strategies

[0524] Gene transfer and gene therapy technologies can be used to deliver therapeutic polynucleotide molecules to tumor cells synthesizing PSCA (i.e., antisense, ribozyme, polynucleotides encoding intrabodies and other PSCA inhibitory molecules). A number of gene therapy approaches are known in the art. Recombinant vectors encoding PSCA antisense polynucleotides, ribozymes, factors capable of interfering with PSCA transcription, and so forth, can be delivered to target tumor cells,using such gene therapy approaches.

[0525] The above therapeutic approaches can be combined with any one of a wide variety of surgical, chemotherapy or radiation therapy regimens. The therapeutic approaches of the invention can enable the use of reduced dosages of chemotherapy (or other therapies) and/or less frequent administration, an advantage for all patients and particularly for those that do not tolerate the toxicity of the chemotherapeutic agent well.

[0526] The anti-tumor activity of a particular composition (e.g., antisense, ribozyme, intrabody), or a combination of such compositions, can be evaluated using various in vitro and in vivo assay systems. In vitro assays that evaluate therapeutic activity include cell growth assays, soft agar assays and other assays indicative of tumor promoting activity, binding assays capable of determining the extent to which a therapeutic composition will inhibit the binding of PSCA to a binding partner, etc.

[0527] In vivo, the effect of a PSCA therapeutic composition can be evaluated in a suitable animal model. For example, xenogenic prostate cancer models can be used, wherein human prostate cancer explants or passaged xenograft tissues are introduced into immune compromised animals, such as nude or SCID mice (Klein et al., 1997, Nature Medicine 3: 402-408). For example, PCT Patent Application WO98/16628 and U.S. Pat. No. 6,107,540 describe various xenograft models of human prostate cancer capable of recapitulating the development of primary tumors, micrometastasis, and the formation of osteoblastic metastases characteristic of late stage disease. Efficacy can be predicted using assays that measure inhibition of tumor formation, tumor regression or metastasis, and the like.

[0528] In vivo assays that evaluate the promotion of apoptosis are useful in evaluating therapeutic compositions. In one embodiment, xenografts from tumor bearing mice treated with the therapeutic composition can be examined for the presence of apoptotic foci and compared to untreated control xenograft-bearing mice. The extent to which apoptotic foci are found in the tumors of the treated mice provides an indication of the therapeutic efficacy of the composition.

[0529] The therapeutic compositions used in the practice of the foregoing methods can be formulated into pharmaceutical compositions comprising a carrier suitable for the desired delivery method. Suitable carriers include any material that when combined with the therapeutic composition retains the anti-tumor function of the therapeutic composition and is generally non-reactive with the patient's immune system. Examples include, but are not limited to, any of a number of standard pharmaceutical carriers such as sterile phosphate buffered saline solutions, bacteriostatc water, and the like (see, generally, Remington's Pharmaceutical Sciences 16^{th} Edition, A. Osal., Ed., 1980).

[0530] Therapeutic formulations can be solubilized and administered via any route capable of delivering the therapeutic composition to the tumor site. Potentially effective routes of administration include, but are not limited to, intravenous, parenteral, intraperitoneal, intramuscular, intratumor, intradermal, intraorgan, orthotopic, and the like. A preferred formulation for intravenous injection comprises the therapeutic composition in a solution of preserved bacteriostatic water, sterile unpreserved water, and/or diluted in polyvinylchloride or polyethylene bags containing 0.9% sterile Sodium Chloride for Injection, USP. Therapeutic protein preparations can be lyophilized and stored as sterile powders, preferably under vacuum, and then reconstituted in bacteriostatic water (containing for example, benzyl alcohol preservative) or in sterile water prior to injection.

[0531] Dosages and administration protocols for the treatment of cancers using the foregoing methods will vary with the method and the target cancer, and will generally depend on a number of other factors appreciated in the art.

[0532] XIII.) Identification, Characterization and Use of Modulators of PSCA

[0533] Methods to Identify and Use Modulators

[0534] In one embodiment, screening is performed to identify modulators that induce or suppress a particular expression profile, suppress or induce specific pathways, preferably generating the associated phenotype thereby. In another embodiment, having identified differentially expressed genes important in a particular state; screens are performed to identify modulators that alter expression of individual genes, either increase or decrease. In another embodiment, screening is performed to identify modulators that alter a biological function of the expression product of a differentially expressed gene. Again, having identified the importance of a gene in a particular state, screens are performed to identify agents that bind and/or modulate the biological activity of the gene product.

[0535] In addition, screens are done for genes that are induced in response to a candidate agent. After identifying a modulator (one that suppresses a cancer expression pattern leading to a normal expression pattern, or a modulator of a cancer gene that leads to expression of the gene as in normal tissue) a screen is performed to identify genes that are specifically modulated in response to the agent. Comparing expression profiles between normal tissue and agent-treated cancer tissue reveals genes that are not expressed in normal tissue or cancer tissue, but are expressed in agent treated tissue, and vice versa. These agent-specific sequences are identified and used by methods described herein for cancer genes or proteins. In particular these sequences and the proteins they encode are used in marking or identifying agent-treated cells. In addition, antibodies are raised against the agent-induced proteins and used to target novel therapeutics to the treated cancer tissue sample.

[0536] Modulator-Related Identification and Screening Assays:

[0537] Gene Expression-Related Assays

[0538] Proteins, nucleic acids, and antibodies of the invention are used in screening assays. The cancer-associated proteins, antibodies, nucleic acids, modified proteins and cells containing these sequences are used in screening assays, such as evaluating the effect of drug candidates on a “gene expression profile,” expression profile of polypeptides or alteration of biological function. In one embodiment, the expression profiles are used, preferably in conjunction with high throughput screening techniques to allow monitoring for expression profile genes after treatment with a candidate agent (e.g., Davis, G F, et al, J Biol Screen 7:69 (2002); Zlokarnik, et al., Science 279:84-8 (1998); Heid, Genome Res 6:986-94, 1996)

[0539] The cancer proteins, antibodies, nucleic acids, modified proteins and cells containing the native or modified cancer proteins or genes are used in screening assays. That is, the present invention comprises methods for screening for compositions which modulate the cancer phenotype or a physiological function of a cancer protein of the invention. This is done on a gene itself or by evaluating the effect of drug candidates on a “gene expression profile” or biological function. In one embodiment, expression profiles are used, preferably in conjunction with high throughput screening techniques to allow monitoring after treatment with a candidate agent, see Zlokamik, supra.

[0540] A variety of assays are executed directed to the genes and proteins of the invention. Assays are run on an individual nucleic acid or protein level. That is, having identified a particular gene as up regulated in cancer, test compounds are screened for the ability to modulate gene expression or for binding to the cancer protein of the invention. “Modulation” in this context includes an increase or a decrease in gene expression. The preferred amount of modulation will depend on the original change of the gene expression in normal versus tissue undergoing cancer, with changes of at least 10%, preferably 50%, more preferably 100-300%, and in some embodiments 300-1000% or greater. Thus, if a gene exhibits a 4-fold increase in cancer tissue compared to normal tissue, a decrease of about four-fold is often desired; similarly, a 10-fold decrease in cancer tissue compared to normal tissue a target value of a 10-fold increase in expression by the test compound is often desired. Modulators that exacerbate the type of gene expression seen in cancer are also useful, e.g., as an upregulated target in further analyses.

[0541] The amount of gene expression is monitored using nucleic acid probes and the quantification of gene expression levels, or, alternatively, a gene product itself is monitored, e.g., through the use of antibodies to the cancer protein and standard immunoassays. Proteomics and separation techniques also allow for quantification of expression.

[0542] Exgression Monitoring to Identify Compounds that Modify Gene Expression

[0543] In one embodiment, gene expression monitoring, i.e., an expression profile, is monitored simultaneously for a number of entities. Such profiles will typically involve one or more of the genes of FIG. 2. In this embodiment, e.g., cancer nucleic acid probes are attached to biochips to detect and quantify cancer sequences in a particular cell. Alternatively, PCR can be used. Thus, a series, e.g., wells of a microtiter plate, can be used with dispensed primers in desired wells. A PCR reaction can then be performed and analyzed for each well.

[0544] Expression monitoring is performed to identify compounds that modify the expression of one or more cancer-associated sequences, e.g., a polynucleotide sequence set out in FIG. 2. Generally, a test modulator is added to the cells prior to analysis. Moreover, screens are also provided to identify agents that modulate cancer, modulate cancer proteins of the invention, bind to a cancer protein of the invention, or interfere with the binding of a cancer protein of the invention and an antibody or other binding partner.

[0545] In one embodiment, high throughput screening methods involve providing a library containing a large number of potential therapeutic compounds (candidate compounds). Such “combinatorial chemical libraries” are then screened in one or more assays to identify those library members (particular chemical species or subclasses) that display a desired characteristic activity. The compounds thus identified can serve as conventional “lead compounds,” as compounds for screening, or as therapeutics.

[0546] In certain embodiments, combinatorial libraries of potential modulators are screened for an ability to bind to a cancer polypeptide or to modulate activity. Conventionally, new chemical entities with useful properties are generated by identifying a chemical compound (called a “lead compound”) with some desirable property or activity, e.g., inhibiting activity, creating variants of the lead compound, and evaluating the property and activity of those variant compounds. Often, high throughput screening (HTS) methods are employed for such an analysis.

[0547] As noted above, gene expression monitoring is conveniently used to test candidate modulators (e.g., protein, nucleic acid or small molecule). After the candidate agent has been added and the cells allowed to incubate for a period, the sample containing a target sequence to be analyzed is, e.g., added to a biochip.

[0548] If required, the target sequence is prepared using known techniques. For example, a sample is treated to lyse the cells, using known lysis buffers, electroporation, etc., with purification and/or amplification such as PCR performed as appropriate. For example, an in vitro transcription with labels covalently attached to the nucleotides is performed. Generally, the nucleic acids are labeled with biotin-FITC or PE, or with cy3 or cy5.

[0549] The target sequence can be labeled with, e.g., a fluorescent, a chemiluminescent, a chemical, or a radioactive signal, to provide a means of detecting the target sequence's specific binding to a probe. The label also can be an enzyme, such as alkaline phosphatase or horseradish peroxidase, which when provided with an appropriate substrate produces a product that is detected. Alternatively, the label is a labeled compound or small molecule, such as an enzyme inhibitor, that binds but is not catalyzed or altered by the enzyme. The label also can be a moiety or compound, such as, an epitope tag or biotin which specifically binds to streptavidin. For the example of biotin, the streptavidin is labeled as described above, thereby, providing a detectable signal for the bound target sequence. Unbound labeled streptavidin is typically removed prior to analysis.

[0550] As will be appreciated by those in the art, these assays can be direct hybridization assays or can comprise “sandwich assays”, which include the use of multiple probes, as is generally outlined in U.S. Pat. Nos. 5,681,702; 5,597,909; 5,545,730; 5,594,117; 5,591,584; 5,571,670; 5,580,731; 5,571,670; 5,591,584; 5,624,802; 5,635,352; 5,594,118; 5,359,100; 5,124,246; and 5,681,697. In this embodiment, in general, the target nucleic acid is prepared as outlined above, and then added to the biochip comprising a plurality of nucleic acid probes, under conditions that allow the formation of a hybridization complex.

[0551] A variety of hybridization conditions are used in the present invention, including high, moderate and low stringency conditions as outlined above. The assays are generally run under stringency conditions which allow formation of the label probe hybridization complex only in the presence of target. Stringency can be controlled by altering a step parameter that is a thermodynamic variable, including, but not limited to, temperature, formamide concentration, salt concentration, chaotropic salt concentration pH, organic solvent concentration, etc. These parameters may also be used to control non-specific binding, as is generally outlined in U.S. Pat. No. 5,681,697. Thus, it can be desirable to perform certain steps at higher stringency conditions to reduce non-specific binding.

[0552] The reactions outlined herein can be accomplished in a variety of ways. Components of the reaction can be added simultaneously, or sequentially, in different orders, with preferred embodiments outlined below. In addition, the reaction may include a variety of other reagents. These include salts, buffers, neutral proteins, e.g. albumin, detergents, etc. which can be used to facilitate optimal hybridization and detection, and/or reduce nonspecific or background interactions. Reagents that otherwise improve the efficiency of the assay, such as protease inhibitors, nuclease inhibitors, anti-microbial agents, etc., may also be used as appropriate, depending on the sample preparation methods and purity of the target. The assay data are analyzed to determine the expression levels of individual genes, and changes in expression levels as between states, forming a gene expression profile.

[0553] Biological Activity-Related Assays

[0554] The invention provides methods identify or screen for a compound that modulates the activity of a cancer-related gene or protein of the invention. The methods comprise adding a test compound, as defined above, to a cell comprising a cancer protein of the invention. The cells contain a recombinant nucleic acid that encodes a cancer protein of the invention. In another embodiment, a library of candidate agents is tested on a plurality of cells.

[0555] In one aspect, the assays are evaluated in the presence or absence or previous or subsequent exposure of physiological signals, e.g. hormones, antibodies, peptides, antigens, cytokines, growth factors, action potentials, pharmacological agents including chemotherapeutics, radiation, carcinogenics, or other cells (i.e., cell-cell contacts). In another example, the determinations are made at different stages of the cell cycle process. In this way, compounds that modulate genes or proteins of the invention are identified. Compounds with pharmacological activity are able to enhance or interfere with the activity of the cancer protein of the invention. Once identified, similar structures are evaluated to identify critical structural features of the compound.

[0556] In one embodiment, a method of modulating (e.g., inhibiting) cancer cell division is provided; the method comprises administration of a cancer modulator. In another embodiment, a method of modulating (e.g., inhibiting) cancer is provided; the method comprises administration of a cancer modulator. In a further embodiment, methods of treating cells or individuals with cancer are provided; the method comprises administration of a cancer modulator.

[0557] In one embodiment, a method for modulating the status of a cell that expresses a gene of the invention is provided. As used herein status comprises such art-accepted parameters such as growth, proliferation, survival, function, apoptosis, senescence, location, enzymatic activity, signal transduction, etc. of a cell. In one embodiment, a cancer inhibitor is an antibody as discussed above. In another embodiment, the cancer inhibitor is an antisense molecule. A variety of cell growth, proliferation, and metastasis assays are known to those of skill in the art, as described herein.

[0558] High Throughrut Screening to Identify Modulators

[0559] The assays to identify suitable modulators are amenable to high throughput screening. Preferred assays thus detect enhancement or inhibition of cancer gene transcription, inhibition or enhancement of polypeptide expression, and inhibition or enhancement of polypeptide activity.

[0560] In one embodiment, modulators evaluated in high throughput screening methods are proteins, often naturally occurring proteins or fragments of naturally occurring proteins. Thus, e.g., cellular extracts containing proteins, or random or directed digests of proteinaceous cellular extracts, are used. In this way, libraries of proteins are made for screening in the methods of the invention. Particularly preferred in this embodiment are libraries of bacterial, fungal, viral, and mammalian proteins, with the latter being preferred, and human proteins being especially preferred. Particularly useful test compound will be directed to the class of proteins to which the target belongs, e.g., substrates for enzymes, or ligands and receptors.

[0561] Use of Soft Agar Growth and Colony Formation to Identify and Characterize Modulators

[0562] Normal cells require a solid substrate to attach and grow. When cells are transformed, they lose this phenotype and grow detached from the substrate. For example, transformed cells can grow in stirred suspension culture or suspended in semi-solid media, such as semi-solid or soft agar. The transformed cells, when transfected with tumor suppressor genes, can regenerate normal phenotype and once again require a solid substrate to attach to and grow. Soft agar growth or colony formation in assays are used to identify modulators of cancer sequences, which when expressed in host cells, inhibit abnormal cellular proliferation and transformation. A modulator reduces or eliminates the host cells' ability to grow suspended in solid or semisolid media, such as agar.

[0563] Techniques for soft agar growth or colony formation in suspension assays are described in Freshney, Culture of Animal Cells a Manual of Basic Technique (3rd ed., 1994). See also, the methods section of Garkavtsev et al. (1996), supra.

[0564] Evaluation of Contact Inhibition and Growth Density Limitation to Identify and Characterize Modulators

[0565] Normal cells typically grow in a flat and organized pattern in cell culture until they touch other cells. When the cells touch one another, they are contact inhibited and stop growing. Transformed cells, however, are not contact inhibited and continue to grow to high densities in disorganized foci. Thus, transformed cells grow to a higher saturation density than corresponding normal cells. This is detected morphologically by the formation of a disoriented monolayer of cells or cells in foci. Alternatively, labeling index with (³H)-thymidine at saturation density is used to measure density limitation of growth, similarly an MTT or Alamar blue assay will reveal proliferation capacity of cells and the the ability of modulators to affect same. See Freshney (1994), supra. Transformed cells, when transfected with tumor suppressor genes, can regenerate a normal phenotype and become contact inhibited and would grow to a lower density.

[0566] In this assay, labeling index with ³H)-thymidine at saturation density is a preferred method of measuring density limitation of growth. Transformed host cells are transfected with a cancer-associated sequence and are grown for 24 hours at saturation density in non-limiting medium conditions. The percentage of cells labeling with (³H)-thymidine is determined by incorporated cpm.

[0567] Contact independent growth is used to identify modulators of cancer sequences, which had led to abnormal cellular proliferation and transformation. A modulator reduces or eliminates contact independent growth, and returns the cells to a normal phenotype.

[0568] Evaluation of Growth Factor or Serum Dependence to Identify and Characterize Modulators

[0569] Transformed cells have lower serum dependence than their normal counterparts (see, e.g., Temin, J. Natl. Cancer Inst. 37:167-175 (1966); Eagle et al., J. Exp. Med 131:836-879 (1970)); Freshney, supra. This is in part due to release of various growth factors by the transformed cells. The degree of growth factor or serum dependence of transformed host cells can be compared with that of control. For example, growth factor or serum dependence of a cell is monitored in methods to identify and characterize compounds that modulate cancer-associated sequences of the invention.

[0570] Use of Tumor-Specific Marker Levels to Identify and Characterize Modulators

[0571] Tumor cells release an increased amount of certain factors (hereinafter “tumor specific markers”) than their normal counterparts. For example, plasminogen activator (PA) is released from human glioma at a higher level than from normal brain cells (see, e.g., Gullino, Angiogenesis, Tumor Vascularization, and Potential Interference with Tumor Growth, in Biological Responses in Cancer, pp. 178-184 (Mihich (ed.) 1985)). Similarly, Tumor Angiogenesis Factor (TAF) is released at a higher level in tumor cells than their normal counterparts. See, e.g., Folkman, Angiogenesis and Cancer, Sem Cancer Biol. (1992)), while bFGF is released from endothelial tumors (Ensoli, B et al).

[0572] Various techniques which measure the release of these factors are described in Freshney (1994), supra. Also, see, Unkless et al., J. Biol. Chem. 249:4295-4305 (1974); Strickland & Beers, J. Biol. Chem. 251:5694-5702 (1976); Whur et al., Br. J. Cancer 42:305 312 (1980); Gullino, Angiogenesis, Tumor Vascularization, and Potential Interference with Tumor Growth, in Biological Responses in Cancer, pp. 178-184 (Mihich (ed.) 1985); Freshney, Anticancer Res. 5:111-130 (1985). For example, tumor specific marker levels are monitored in methods to identify and characterize compounds that modulate cancer-associated sequences of the invention.

[0573] Invasiveness into Matrigel to Identify and Characterize Modulators

[0574] The degree of invasiveness into Matrigel or an extracellular matrix constituent can be used as an assay to identify and characterize compounds that modulate cancer associated sequences. Tumor cells exhibit a positive correlation between malignancy and invasiveness of cells into Matrigel or some other extracellular matrix constituent. In this assay, tumorigenic cells are typically used as host cells. Expression of a tumor suppressor gene in these host cells would decrease invasiveness of the host cells. Techniques described in Cancer Res. 1999; 59:6010; Freshney (1994), supra, can be used. Briefly, the level of invasion of host cells is measured by using filters coated with Matrigel or some other extracellular matrix constituent. Penetration into the gel, or through to the distal side of the filter, is rated as invasiveness, and rated histologically by number of cells and distance moved, or by prelabeling the cells with ¹²⁵1 and counting the radioactivity on the distal side of the filter or bottom of the dish. See, e.g., Freshney (1984), supra.

[0575] Evaluation of Tumor Growth In Vivo to Identify and Characterize Modulators

[0576] Effects of cancer-associated sequences on cell growth are tested in transgenic or immune-suppressed organisms. Transgenic organisms are prepared in a variety of art-accepted ways. For example, knock-out transgenic organisms, e.g., mammals such as mice, are made, in which a cancer gene is disrupted or in which a cancer gene is inserted. Knock-out transgenic mice are made by insertion of a marker gene or other heterologous gene into the endogenous cancer gene site in the mouse genome via homologous recombinabon. Such mice can also be made by substituting the endogenous cancer gene with a mutated version of the cancer gene, or by mutating the endogenous cancer gene, e.g., by exposure to carcinogens.

[0577] To prepare transgenic chimeric animals, e.g., mice, a DNA construct is introduced into the nuclei of embryonic stem cells. Cells containing the newly engineered genetic lesion are injected into a host mouse embryo, which is re-implanted into a recipient female. Some of these embryos develop into chimeric mice that possess germ cells some of which are derived from the mutant cell line. Therefore, by breeding the chimeric mice it is possible to obtain a new line of mice containing the introduced genetic lesion (see, e.g., Capecchi et al., Science 244:1288 (1989)). Chimeric mice can be derived according to U.S. Pat. No. 6,365,797, issued 2 Apr. 2002; U.S. Pat. No. 6,107,540 issued 22 Aug. 2000; Hogan et al., Manipulating the Mouse Embryo: A laboratory Manual, Cold Spring Harbor Laboratory (1988) and Teratocarcinomas and Embryonic Stem Cells: A Practical Approach, Robertson, ed., IRL Press, Washington, D.C., (1987).

[0578] Alternatively, various immune-suppressed or immune-deficient host animals can be used. For example, a genetically athymic “nude” mouse (see, e.g., Giovanella et al., J. Natl. Cancer Inst. 52:921 (1974)), a SCID mouse, a thymectornized mouse, or an irradiated mouse (see, e.g., Bradley et al., Br. J. Cancer 38:263 (1978); Selby et al., Br. J. Cancer 41:52 (1980)) can be used as a host. Transplantable tumor cells (typically about 106 cells) injected into isogenic hosts produce invasive tumors in a high proportion of cases, while normal cells of similar origin will not. In hosts which developed invasive tumors, cells expressing cancer-associated sequences are injected subcutaneously or orthotopically. Mice are then separated into groups, including control groups and treated experimental groups) e.g. treated with a modulator). After a suitable length of time, preferably 4-8 weeks, tumor growth is measured (e.g., by volume or by its two largest dimensions, or weight) and compared to the control. Tumors that have statistically significant reduction (using, e.g., Student's T test) are said to have inhibited growth.

[0579] In Vitro Assays to Identify and Characterize Modulators

[0580] Assays to identify compounds with modulating activity can be performed in vitro. For example, a cancer polypeptide is first contacted with a potential modulator and incubated for a suitable amount of Ume, e.g., from 0.5 to 48 hours. In one embodiment, the cancer polypeptide levels are determined in vitro by measuring the level of protein or mRNA. The level of protein is measured using immunoassays such as Western blotting, ELISA and the like with an antibody that selectively binds to the cancer polypeptide or a fragment thereof. For measurement of mRNA, amplification, e.g., using PCR, LCR, or hybridization assays, e.g., Northern hybridization, RNAse protection, dot blotting, are preferred. The level of protein or mRNA is detected using directly or indirectly labeled detection agents, e.g., fluorescently or radioactively labeled nucleic acids, radioactively or enzymatically labeled antibodies, and the like, as described herein.

[0581] Alternatively, a reporter gene system can be devised using a cancer protein promoter operably linked to a reporter gene such as luciferase, green fluorescent protein, CAT, or P-gal. The reporter construct is typically transfected into a cell. After treatment with a potential modulator, the amount of reporter gene transcription, translation, or activity is measured according to standard techniques known to those of skill in the art (Davis G F, supra; Gonzalez, J. & Negulescu, P. Curr. Opin. Biotechnol. 1998: 9:624).

[0582] As outlined above, in vitro screens are done on individual genes and gene products. That is, having identified a particular differentially expressed gene as important in a particular state, screening of modulators of the expression of the gene or the gene product itself is performed.

[0583] In one embodiment, screening for modulators of expression of specific gene(s) is performed. Typically, the expression of only one or a few genes is evaluated. In another embodiment, screens are designed to first find compounds that bind to differentially expressed proteins. These compounds are then evaluated for the ability to modulate differentially expressed activity. Moreover, once initial candidate compounds are identified, variants can be further screened to better evaluate structure activity relationships.

[0584] Binding Assays to Identify and Characterize Modulators

[0585] In binding assays in accordance with the invention, a purified or isolated gene product of the invention is generally used. For example, antibodies are generated to a protein of the invention, and immunoassays are run to determine the amount and/or location of protein. Alternatively, cells comprising the cancer proteins are used in the assays.

[0586] Thus, the methods comprise combining a cancer protein of the invention and a candidate compound such as a ligand, and determining the binding of the compound to the cancer protein of the invention. Preferred embodiments utilize the human cancer protein; animal models of human disease of can also be developed and used. Also, other analogous mammalian proteins also can be used as appreciated by those of skill in the art. Moreover, in some embodiments variant or derivative cancer proteins are used.

[0587] Generally, the cancer protein of the invention, or the ligand, is non-diffusibly bound to an insoluble support. The support can, e.g., be one having isolated sample receiving areas (a microtiter plate, an array, etc.). The insoluble supports can be made of any composition to which the compositions can be bound, is readily separated from soluble material, and is otherwise compatible with the overall method of screening. The surface of such supports can be solid or porous and of any convenient shape.

[0588] Examples of suitable insoluble supports include microtiter plates, arrays, membranes and beads. These are typically made of glass, plastic (e.g., polystyrene), polysaccharide, nylon, nitrocellulose, or Teflon™, etc. Microtiter plates and arrays are especially convenient because a large number of assays can be carried out simultaneously, using small amounts of reagents and samples. The particular manner of binding of the composition to the support is not crucial so long as it is compatible with the reagents and overall methods of the invention, maintains the activity of the composition and is nondiffusable. Preferred methods of binding include the use of antibodies which do not sterically block either the ligand binding site or activation sequence when attaching the protein to the support, direct binding to “sticky” or ionic supports, chemical crosslinking, the synthesis of the protein or agent on the surface, etc. Following binding of the protein or ligand/binding agent to the support, excess unbound material is removed by washing. The sample receiving areas may then be blocked through incubation with bovine serum albumin (BSA), casein or other innocuous protein or other moiety.

[0589] Once a cancer protein of the invention is bound to the support, and a test compound is added to the assay. Alternatively, the candidate binding agent is bound to the support and the cancer protein of the invention is then added. Binding agents include specific antibodies, non-natural binding agents identified in screens of chemical libraries, peptide analogs, etc.

[0590] Of particular interest are assays to identify agents that have a low toxicity for human cells. A wide variety of assays can be used for this purpose, including proliferation assays, cAMP assays, labeled in vitro protein-protein binding assays, electrophoretic mobility shift assays, immunoassays for protein binding, functional assays (phosphorylation assays, etc.) and the like.

[0591] A determination of binding of the test compound (ligand, binding agent, modulator, etc.) to a cancer protein of the invention can be done in a number of ways. The test compound can be labeled, and binding determined directly, e.g., by attaching all or a portion of the cancer protein of the invention to a solid support, adding a labeled candidate compound (e.g., a fluorescent label), washing off excess reagent, and determining whether the label is present on the solid support. Various blocking and washing steps can be utilized as appropriate.

[0592] In certain embodiments, only one of the components is labeled, e.g., a protein of the invention or ligands labeled. Alternatively, more than one component is labeled with different labels, e.g., I¹²⁵, for the proteins and a fluorophor for the compound. Proximity reagents, e.g., quenching or energy transfer reagents are also useful.

[0593] Competitive Binding to Identify and Characterize Modulators

[0594] In one embodiment, the binding of the “test compound” is determined by competitive binding assay with a “competitor.” The competitor is a binding moiety that binds to the target molecule (e.g., a cancer protein of the invention). Competitors include compounds such as antibodies, peptides, binding partners, ligands, etc. Under certain circumstances, the competitive binding between the test compound and the competitor displaces the test compound. In one embodiment, the test compound is labeled. Either the test compound, the competitor, or both, is added to the protein for a time sufficient to allow binding. Incubations are performed at a temperature that facilitates optimal activity, typically between four and 40° C. Incubation periods are typically optimized, e.g., to facilitate rapid high throughput screening; typically between zero and one hour will be sufficient. Excess reagent is generally removed or washed away. The second component is then added, and the presence or absence of the labeled component is followed, to indicate binding.

[0595] In one embodiment, the competitor is added first, followed by the test compound. Displacement of the competitor is an indication that the test compound is binding to the cancer protein and thus is capable of binding to, and potentially modulating, the activity of the cancer protein. In this embodiment, either component can be labeled. Thus, e.g., if the competitor is labeled, the presence of label in the post-test compound wash solution indicates displacement by the test compound. Alternatively, if the test compound is labeled, the presence of the label on the support indicates displacement.

[0596] In an alternative embodiment, the test compound is added first, with incubation and washing, followed by the competitor. The absence of binding by the competitor indicates that the test compound binds to the cancer protein with higher affinity than the competitor. Thus, if the test compound is labeled, the presence of the label on the support, coupled with a lack of competitor binding, indicates that the test compound binds to and thus potentially modulates the cancer protein of the invention.

[0597] Accordingly, the competitive binding methods comprise differential screening to identity agents that are capable of modulating the activity of the cancer proteins of the invention. In this embodiment, the methods comprise combining a cancer protein and a competitor in a first sample. A second sample comprises a test compound, the cancer protein, and a competitor. The binding of the competitor is determined for both samples, and a change, or difference in binding between the two samples indicates the presence of an agent capable of binding to the cancer protein and potentially modulating its activity. That is, if the binding of the competitor is different in the second sample relative to the first sample, the agent is capable of binding to the cancer protein.

[0598] Alternatively, differential screening is used to identify drug candidates that bind to the native cancer protein, but cannot bind to modified cancer proteins. For example the structure of the cancer protein is modeled and used in rational drug design to synthesize agents that interact with that site, agents which generally do not bind to site-modified proteins. Moreover, such drug candidates that affect the activity of a native cancer protein are also identified by screening drugs for the ability to either enhance or reduce the activity of such proteins.

[0599] Positive controls and negative controls can be used in the assays. Preferably control and test samples are performed in at least triplicate to obtain statistically significant results. Incubation of all samples occurs for a time sufficient to allow for the binding of the agent to the protein. Following incubation, samples are washed free of non-specifically bound material and the amount of bound, generally labeled agent determined. For example, where a radiolabel is employed, the samples can be counted in a scintillation counter to determine the amount of bound compound.

[0600] A variety of other reagents can be included in the screening assays. These include reagents like salts, neutral proteins, e.g. albumin, detergents, etc. which are used to facilitate optimal protein-protein binding and/or reduce non-specific or background interactions. Also reagents that otherwise improve the efficiency of the assay, such as protease inhibitors, nuclease inhibitors, anti-microbial agents, etc., can be used. The mixture of components is added in an order that provides for the requisite binding.

[0601] Use of Polynucleotides to Down-Regulate or Inhibit a Protein of the Invention

[0602] Polynucleotide modulators of cancer can be introduced into a cell containing the target nucleotide sequence by formation of a conjugate with a ligand-binding molecule, as described in WO 91/04753. Suitable ligand-binding molecules include, but are not limited to, cell surface receptors, growth factors, other cytokines, or other ligands that bind to cell surface receptors. Preferably, conjugation of the ligand binding molecule does not substantially interfere with the ability of the ligand binding molecule to bind to its corresponding molecule or receptor, or block entry of the sense or antisense oligonucleotide or its conjugated version into the cell. Alternatively, a polynucleotide modulator of cancer can be introduced into a cell containing the target nucleic acid sequence, e.g., by formation of a polynucleotide-lipid complex, as described in WO 90/10448. It is understood that the use of antisense molecules or knock out and knock in models may also be used in screening assays as discussed above, in addition to methods of treatment.

[0603] Inhibitory and Antisense Nucleotides

[0604] In certain embodiments, the activity of a cancer-associated protein is down-regulated, or entirely inhibited, by the use of antisense polynucleotide or inhibitory small nuclear RNA (snRNA), i.e., a nucleic acid complementary to, and which can preferably hybridize specifically to, a coding mRNA nucleic acid sequence, e.g., a cancer protein of the invention, mRNA, or a subsequence thereof. Binding of the antisense polynucleotide to the mRNA reduces the translation and/or stability of the mRNA.

[0605] In the context of this invention, antisense polynucleotides can comprise naturally occurring nucleotides, or synthetic species formed from naturally occurring subunits or their close homologs. Antisense polynucleotides may also have altered sugar moieties or inter-sugar linkages. Exemplary among these are the phosphorothioate and other sulfur containing species which are known for use in the art. Analogs are comprised by this invention so long as they function effectively to hybridize with nucleotides of the invention. See, e.g., Isis Pharmaceuticals, Carlsbad, Calif.; Sequitor, Inc., Natick, Mass.

[0606] Such antisense polynucleotides can readily be synthesized using recombinant means, or can be synthesized in vitro. Equipment for such synthesis is sold by several vendors, including Applied Biosystems. The preparation of other oligonucleotides such as phosphorothioates and alkylated derivatives is also well known to those of skill in the art.

[0607] Antisense molecules as used herein include antisense or sense oligonucleotides. Sense oligonucleotides can, e.g., be employed to block transcription by binding to the anti-sense strand. The antisense and sense oligonucleotide comprise a single stranded nucleic acid sequence (either RNA or DNA) capable of binding to target mRNA (sense) or DNA (antisense) sequences for cancer molecules. Antisense or sense oligonucleotides, according to the present invention, comprise a fragment generally at least about 12 nucleotides, preferably from about 12 to 30 nucleotides. The ability to derive an antisense or a sense oligonucleotide, based upon a cDNA sequence encoding a given protein is described in, e.g., Stein & Cohen (Cancer Res. 48:2659 (1988 and van der Krol et al. (BioTechniques 6:958 (1988)).

[0608] Ribozymes

[0609] In addition to antisense polynucleotides, ribozymes can be used to target and inhibit transcription of cancer-associated nucleotide sequences. A ribozyme is an RNA molecule that catalytically cleaves other RNA molecules. Different kinds of ribozymes have been described, including group I ribozymes, hammerhead ribozymes, hairpin ribozymes, RNase P, and axhead ribozymes (see, e.g., Castanotto et al., Adv. in Pharmacology 25: 289-317 (1994) for a general review of the properties of different ribozymes).

[0610] The general features of hairpin ribozymes are described, e.g., in Hampel et al., Nucl. Acids Res. 18:299-304 (1990); European Patent Publication No. 0360257; U.S. Pat. No. 5,254,678. Methods of preparing are well known to those of skill in the art (see, e.g., WO 94/26877; Ojwang et al., Proc. Natl. Acad. Sci. USA 90:6340-6344 (1993); Yamada et al., Human Gene Therapy 1:39-45 (1994); Leavitt et al., Proc. Natl. Acad Sci. USA 92:699-703 (1995); Leavitt et al., Human Gene Therapy 5: 1151-120 (1994); and Yamada et al., Virology 205: 121-126 (1994)).

[0611] Use of Modulators in Phenotypic Screening

[0612] In one embodiment, a test compound is administered to a population of cancer cells, which have an associated cancer expression profile. By “administration” or “contacting”herein is meant that the modulator is added to the cells in such a manner as to allow the modulator to act upon the cell, whether by uptake and intracellular action, or by action at the cell surface. In some embodiments, a nucleic acid encoding a proteinaceous agent (i.e., a peptide) is put into a viral construct such as an adenoviral or retroviral construct, and added to the cell, such that expression of the peptide agent is accomplished, e.g., PCT US97/01019. Regulatable gene therapy systems can also be used. Once the modulator has been administered to the cells, the cells are washed if desired and are allowed to incubate under preferably physiological conditions for some period. The cells are then harvested and a new gene expression profile is generated. Thus, e.g., cancer tissue is screened for agents that modulate, e.g., induce or suppress, the cancer phenotype. A change in at least one gene, preferably many, of the expression profile indicates that the agent has an effect on cancer activity. Similarly, altering a biological function or a signaling pathway is indicative of modulator activity. By defining such a signature for the cancer phenotype, screens for new drugs that alter the phenotype are devised. With this approach, the drug target need not be known and need not be represented in the original gene/protein expression screening platform, nor does the level of transcript for the target protein need to change. The modulator inhibiting function will serve as a surrogate marker

[0613] As outlined above, screens are done to assess genes or gene products. That is, having identified a particular differentially expressed gene as important in a particular state, screening of modulators of either the expression of the gene or the gene product itself is performed.

[0614] Use of Modulators to Affect Peptides of the Invention

[0615] Measurements of cancer polypeptide activity, or of the cancer phenotype are performed using a variety of assays. For example, the effects of modulators upon the function of a cancer polypeptide(s) are measured by examining parameters described above. A physiological change that affects activity is used to assess the influence of a test compound on the polypeptides of this invention. When the functional outcomes are determined using intact cells or animals, a variety of effects can be assesses such as, in the case of a cancer associated with solid tumors, tumor growth, tumor metastasis, neovascularization, hormone release, transcriptional changes to both known and uncharacterized genetic markers (e.g., by Northern blots), changes in cell metabolism such as cell growth or pH changes, and changes in intracellular second messengers such as cGNIP.

[0616] Methods of Identifying Characterizing Cancer-Associated Sequences

[0617] Expression of various gene sequences is correlated with cancer. Accordingly, disorders based on mutant or variant cancer genes are determined. In one embodiment, the invention provides methods for identifying cells containing variant cancer genes, e.g., determining the presence of, all or part, the sequence of at least one endogenous cancer gene in a cell. This is accomplished using any number of sequencing techniques. The invention comprises methods of identifying the cancer genotype of an individual, e.g., determining all or part of the sequence of at least one gene of the invention in the individual. This is generally done in at least one tissue of the individual, e.g., a tissue set forth in Table I, and may include the evaluation of a number of tissues or different samples of the same tissue. The method may include comparing the sequence of the sequenced gene to a known cancer gene, i.e., a wild-type gene to determine the presence of family members, homologies, mutations or variants. The sequence of all or part of the gene can then be compared to the sequence of a known cancer gene to determine if any differences exist. This is done using any number of known homology programs, such as BLAST, Bestfit, etc. The presence of a difference in the sequence between the cancer gene of the patient and the known cancer gene correlates with a disease state or a propensity for a disease state, as outlined herein. In a preferred embodiment, the cancer genes are used as probes to determine the number of copies of the cancer gene in the genome. The cancer genes are used as probes to determine the chromosomal localization of the cancer genes. Information such as chromosomal localization finds use in providing a diagnosis or prognosis in particular when chromosomal abnormalities such as translocations, and the like are identified in the cancer gene locus.

[0618] XIV.) Kits/Articles of Manufacture

[0619] For use in the laboratory, prognostic, prophylactic, diagnostic and therapeutic applications described herein, kits are within the scope of the invention. Such kits can comprise a carrier, package, or container that is compartmentalized to receive one or more containers such as vials, tubes, and the like, each of the container(s) comprising one of the separate elements to be used in the method, along with a label or insert comprising instructions for use, such as a use described herein. For example, the container(s) can comprise a probe that is or can be detectably labeled. Such probe can be an antibody or polynucleotide specific for a protein or a gene or message of the invention, respectively. Where the method utilizes nucleic acid hybridization to detect the target nucleic acid, the kit can also have containers containing nucleotide(s) for amplification of the target nucleic acid sequence. Kits can comprise a container comprising a reporter, such as a biotin-binding protein, such as avidin or streptavidin, bound to a reporter molecule, such as an enzymatic, fluorescent, or radioisotope label; such a reporter can be used with, e.g., a nucleic acid or antibody. The kit can include all or part of the amino acid sequences in FIG. 2 or FIG. 3 or analogs thereof, or a nucleic acid molecule that encodes such amino acid sequences.

[0620] The kit of the invention will typically comprise the container described above and one or more other containers associated therewith that comprise materials desirable from a commercial and user standpoint, including buffers, diluents, filters, needles, syringes; carrier, package, container, vial and/or tube labels listing contents and/or instructions for use, and package inserts with instructions for use.

[0621] A label can be present on or with the container to indicate that the composition is used for a specific therapy or non-therapeutic application, such as a prognostic, prophylactic, diagnostic or laboratory application, and can also indicate directions for either in vivo or in vitro use, such as those described herein. Directions and or other information can also be included on an insert(s) or label(s) which is included with or on the kit. The label can be on or associated with the container. A label a can be on a container when letters, numbers or other characters forming the label are molded or etched into the container itself; a label can be associated with a container when it is present within a receptacle or carrier that also holds the container, e.g., as a package insert. The label can indicate that the composition is used for diagnosing, treating, prophylaxing or prognosing a condition, such as a neoplasia of a tissue set forth in Table I.

[0622] The terms “kit” and “article of manufacture” can be used as synonyms.

[0623] In another embodiment of the invention, an article(s) of manufacture containing compositions, such as amino acid sequence(s), small molecule(s), nucleic acid sequence(s), and/or antibody(s), e.g., materials useful for the diagnosis, prognosis, prophylaxis and/or treatment of neoplasias of tissues such as those set forth in Table I is provided. The article of manufacture typically comprises at least one container and at least one label. Suitable containers include, for example, bottles, vials, syringes, and test tubes. The containers can be formed from a variety of materials such as glass, metal or plastic. The container can hold amino acid sequence(s), small molecule(s), nucleic acid sequence(s), cell population(s) and/or antibody(s). In one embodiment, the container holds a polynucleotide for use in examining the mRNA expression profile of a cell, together with reagents used for this purpose. In another embodiment a container comprises an antibody, binding fragment thereof or specific binding protein for use in evaluating protein expression of 282P1 G3 in cells and tissues, or for relevant laboratory, prognostic, diagnostic, prophylactic and therapeutic purposes; indications and/or directions for such uses can be included on or with such container, as can reagents and other compositions or tools used for these purposes. In another embodiment, a container comprises materials for eliciting a cellular or humoral immune response, together with associated indications and/or directions. In another embodiment, a container comprises materials for adoptive immunotherapy, such as cytotoxic T cells (CTL) or helper T cells (HTL), together with associated indications and/or directions; reagents and other compositions or tools used for such purpose can also be included.

[0624] The container can alternatively hold a composition that is effective for treating, diagnosis, prognosing or prophylaxing a condition and can have a sterile access port (for example the container can be an intravenous solution bag or a vial having a stopper pierceable by a hypodermic injection needle). The active agents in the composition can be an antibody capable of specifically binding 282P1G3 and modulating the function of 282P1G3.

[0625] The article of manufacture can further comprise a second container comprising a pharmaceutically-acceptable buffer, such as phosphate-buffered saline, Ringer's solution and/or dextrose solution. It can further include other materials desirable from a commercial and user standpoint, including other buffers, diluents, filters, stirrers, needles, syringes, and/or package inserts with indications and/or instructions for use.

### EXAMPLES

[0626] Various aspects of the invention are further described and illustrated by way of the several examples that follow, none of which is intended to limit the scope of the invention.

### Example 1

### SSH-Generated Isolation of cDNA Fragment of the PSCA Gene

[0627] Intentionally Omitted

### Example 2

### Isolation of Full Lencith PSCA Encoding cDNA

[0628] Intentionally Omitted

### Example 3

### Chromosomal Mapping of PSCA

[0629] Intentionally Omitted

### Example 4

### Expression Analysis of PSCA Variants in Normal Tissues and Patient Specimens

[0630] Previously, PSCA, herein referred to as PSCA v.1, was identified as an antigen expressed in prostate cancer. Its expression was detected in greater than 80% of primary prostate cancers and in the majority of prostate metastasis. It has also been shown to be expressed in bladder cancer, ovary cancer, and pancreatic cancer; these cancers are listed in Table I. By immunohistochemical analysis, PSCA has been shown to be overexpressed on the cell surface of most urothelial transitional carcinoma, and in 60% of primary pancreatic adenocarcinomas. The PSCA expression data has been reported in patent publications (PCT/US98/04664, PCT/US/28883, PCT/US00/19967) and in peer-reviewed articles (Saffran et al., Proc Natl Acad Sci USA. Feb. 27, 2001; 98(5): 2658-2663; Amara et al., Cancer Res. Jun. 15, 2001; 61(12): 4660-65; Reiter et al., Proc Natl Acad Sci USA. Feb. 17, 1998; 95(4): 1735-40; Argani et al., Cancer Res. Jun. 1, 2001; 61(11): 4320-24).

[0631] Specific expression of different PSCA variants was studied in normal and cancer patient specimens (FIG. 14 and FIG. 15). Primers were designed to differentiate between PSCA v.1/v.2/v.4, PSCA v.3 and PSCA v.5. PSCA v.1/v.2/v.4 lead to a PCR product of 425 bp, PSCA v.3 leads to a PCR product of 300 bp, whereas PSCA v.5 leads to a PCR product of 910 bp in size (FIG. 14A).

[0632] First strand cDNA was prepared from normal bladder, brain, heart, kidney, liver, lung, prostate, spleen, skeletal muscle, testis, pancreas, colon, stomach, pools of prostate cancer, bladder cancer, kidney cancer, colon cancer, lung cancer, ovary cancer, breast cancer, cancer metastasis, and pancreas cancer (FIG. 14B). Normalization was performed by PCR using primers to actin. Semi-quantitative PCR, using the variant specific primers was performed at 30 cycles of amplification.

[0633] Results show expression of PSCA v.5 mainly in breast cancer, cancer metastasis, and pancreas cancer, and at lower level in colon cancer and lung cancer. PSCA v.1/v.2/v.4 PCR product was detected in prostate cancer, bladder cancer, kidney cancer, colon cancer, lung cancer, ovary cancer, breast cancer, cancer metastasis, and pancreas cancer. Amongst normal tissues, PSCA v.1/v.2/v.4 PCR product was detected only in prostate, stomach and at lower level in kidney and lung, whereas PSCA v.5 was not detected in any normal tissue. PSCA v.3 PCR detected product was not detected in any of the samples tested.

[0634] Primers were designed to differentiate between PSCA v.4 and PSCA v.5 (FIG. 15A). PSCA v.4 lead to a PCR product of 460 bp, whereas PSCA v.5 lead to a PCR product of 945 bp in size.

[0635] First strand cDNA was prepared from normal bladder, brain, heart, kidney, liver, lung, prostate, spleen, skeletal muscle, testis, pancreas, colon, stomach, pools of prostate cancer, bladder cancer, and multi-xenograft pool (prostate cancer, kidney cancer and bladder cancer xenografts) (FIG. 15B). Normalization was performed by PCR using primers to actin. Semi-quantitative PCR, using the variant specific primers was performed at 30 cycles of amplification.

[0636] Results show expression of PSCA v.4 in prostate cancer, bladder cancer, and multi-xenograft pool, normal kidney and prostate. PSCA v.5 was detected only in normal prostate and bladder cancer.

[0637] The restricted expression of PSCA variants in normal tissues and the expression detected in cancer patient specimens indicate that PSCA variants are therapeutic, prognostic, laboratory, prophylactic, and diagnostic targets for human cancers.

### Example 5

### Transcript Variants of PSCA

[0638] As used herein, the term variant includes transcript variants and single nucleotide polymorphisms (SNPs). Transcript variants are variants of mature mRNA from the same gene which arise by alternative transcription or alternative splicing. Alternative transcripts are transcripts from the same gene but start transcription at different points. Splice variants are mRNA variants spliced differently from the same transcript. In eukaryotes, when a multi-exon gene is transcribed from genomic DNA, the initial RNA is spliced to produce functional mRNA, which has only exons and is used for translation into an amino acid sequence. Accordingly, a given gene can have zero to many alternative transcripts and each transcript can have zero to many splice variants. Each transcript variant has a unique exon makeup, and can have different coding and/or non-coding (5′ or 3′ end) portions, from the original transcript. Transcript variants can code for the same, similar or different proteins, such proteins having the same or a similar function or a different function. The variant proteins can be expressed in the same tissue at the same time, in a different tissue at the same time, or in the same tissue at different times, or in a different tissue at a different time. Proteins encoded by a transcript variant can have similar or different subcellular or extracellular localizations (e.g., secreted versus intracellular).

[0639] Transcript variants are identified by a variety of art-accepted methods. For example, alternative transcripts and splice variants are identified by full-length cloning, or by use of full-length transcript and EST sequences. First, all human ESTs were grouped into clusters which show direct or indirect identity with each other. Second, ESTs in the same cluster were further grouped into sub-clusters and assembled into a consensus sequence. The original gene sequence is compared to the consensus sequence(s) or other full-length sequences. Each consensus sequence is a potential splice variant for that gene. Several confirmation modalities are known in the art, such as identification of the variant by Northern analysis, full length cloning or by use of probe libraries, etc. Even when a variant is identified that is not yet a full-length clone, that portion of the variant is very useful as a research tool, e.g., for antigen generation or for further cloning of the full-length splice variant, using techniques known in the art.

[0640] Moreover, computer programs are available in the art that identify transcript variants based on genomic sequences. Genomic-based transcript variant identification programs include FgenesH (A. Salamov and V. Solovyev, “Ab initio gene finding in Drosophila genomic DNA,” Genome Research. 2000 April; 10(4):516-22); Grail (URL compbio.ornl.gov/Grail-bin/EmptyGrailForm) and GenScan (URL genes.mit.edu/GENSCAN.html). For a general discussion of splice variant identification protocols see, e.g., Southan, C., A genomic perspective on human proteases, FEBS Lett. Jun. 8, 2001; 498(2-3):214-8; de Souza, S. J., et al., Identification of human chromosome 22 transcribed sequences with ORF expressed sequence tags, Proc. Natl Acad Sci USA. Nov. 7, 2000; 97(23):12690-3.

[0641] To further confirm the parameters of a transcript variant, a variety of techniques are available in the art, such as full-length cloning, proteomic validation, PCR-based validation, and 5′ RACE validation, etc. (see e.g., Proteomic Validation: Brennan, S. O., et al., Albumin banks peninsula: a new termination variant characterized by electrospray mass spectrometry, Biochem Biophys Acta. Aug. 17, 1999;1433(1-2):321-6; Ferranti P, et al., Differential splicing of pre-messenger RNA produces multiple forms of mature caprine alpha(s1)-casein, Eur J Biochem. Oct. 1, 1997;249(1):1-7. For PCR-based Validation: Wellmann S, et al., Specific reverse transcription-PCR quantification of vascular endothelial growth factor (VEGF) splice variants by LightCycler technology, Clin Chem. 2001 April;47(4):654-60; Jia, H. P., et al., Discovery of new human beta-defensins using a genomics-based approach, Gene. Jan. 24, 2001; 263(1-2):211-8. For PCR-based and 5′ RACE Validation: Brigle, K. E., et al., Organization of the murine reduced folate carrier gene and identification of variant splice forms, Biochem Biophys Acta. Aug. 7, 1997; 1353(2): 191-8).

[0642] It is known in the art that genomic regions are modulated in cancers. When the genomic region to which a gene maps is modulated in a particular cancer, the alternative transcripts or splice variants of the gene are modulated as well. Disclosed herein is that PSCA has a particular expression profile related to cancer (see, e.g., Table I). Alternative transcripts and splice variants of PSCA are also involved in cancers, for example in one or more of these tissues and in certain additional tissues as well. The variants thus serve as tumor-associated markers/antigens.

[0643] Using the full-length PSCA gene together with EST sequences, four additional transcript variants were identified, designated as PSCA v.2, v.3, v.4, and v.5. The boundaries of exons in the original transcript, PSCA v.1 were shown in Table LI. Schematic structures of the transcript variant nucleic acid sequences are shown in FIG. 10. In FIG. 10, bars with the same graphic pattern depict stretches of contiguous genetic material, e.g., the black bars designate genomic sequence found in variant 1.

[0644] Tables LII(a)-(d) through LV(a)-(d) are set forth on a variant-by-variant basis. LII(a)-(d) shows the nucleotide sequences of the transcript variants. Table LIII(a)-(d) shows the alignment of the transcript variants with nucleic acid sequence of PSCA v.1 (for v.2 only) or with PSCAv.2 (for all other variants). Table LIV(a)-(d) present the amino acid translation of the transcript variants for the identified reading frame orientation. Table LV(a)-(d) displays alignments of the amino acid sequence encoded by the splice variant with that of PSCA v.1.

### Example 6

### Single Nucleotide Polymorphisms of PSCA

[0645] A Single Nucleotide Polymorphism (SNP) is a single base pair variation in a nucleotide sequence at a specific location. At any given point of the genome, there are four possible nucleotide base pairs: A/T, C/G, G/C, and T/A. As used herein, an allele is one of a series of alternative forms of a given gene, differing in DNA sequence, and affecting a product (RNA and/or protein).

[0646] A SNP that occurs on a cDNA is called a cSNP. This cSNP may change amino acids of the protein encoded by the gene and thus change the function of the protein. Some SNPs cause inherited diseases; others contribute to quantitative variations in phenotype and reactions to environmental factors including diet and drugs among individuals. Therefore, the existence of a SNP and/or combinations of alleles (called haplotypes) have many useful applications, such as diagnosis of inherited diseases, determination of drug reactions and dosage, identification of genes responsible for diseases, and analysis of the genetic relationship between individuals (P. Nowotny, J. M. Kwon and A. M. Goate, “SNP analysis to dissect human traits,” Curr. Opin. Neurobiol. 2001 October; 11 (5):637-641; M. Pirmohamed and B. K. Park, “Genetic susceptibility to adverse drug reactions,” Trends Pharmacol. Sci. 2001 June; 22(6):298-305; J. H. Riley, C. J. Allan, E. Lai and A. Roses, “The use of single nucleotide polymorphisms in the isolation of common disease genes,” Pharmacogenomics. 2000 February; 1(1):39-47; R. Judson, J. C. Stephens and A. Windemuth, “The predictive power of haplotypes in clinical response,” Pharmacogenomics. 2000 February; 1(1):15-26).

[0647] SNPs are identified by a variety of art-accepted methods (P. Bean, “The promising voyage of SNP target discovery,” Am. Clin. Lab. 2001 October-November; 20(9):18-20; K. M. Weiss, “In search of human variation,” Genome Res. 1998 July; 8(7):691-697; M. M. She, “Enabling large-scale pharmacogenetic studies by high-throughput mutation detection and genotyping technologies,” Clin. Chem. 2001 February; 47(2):164-172). For example, SNPs are identified by sequencing DNA fragments that show polymorphism by gel-based methods such as restriction fragment length polymorphism (RFLP) and denaturing gradient gel electrophoresis (DGGE). They are also discovered by direct sequencing of DNA samples pooled from different individuals or by comparing sequences from different DNA samples. With the rapid accumulation of sequence data in public and private databases, one also discovers SNPs by comparing sequences using computer programs (Z. Gu, L. Hillier and P. Y. Kwok, “Single nucleotide polymorphism hunting in cyberspace,” Hum. Mutat. 1998; 12(4):221-225). SNPs can be verified and the genotype or haplotype of an individual can be determined by a variety of methods including direct sequencing and high throughput microarrays (P. Y. Kwok, “Methods for genotyping single nucleotide polymorphisms,” Annu. Rev. Genomics Hum. Genet. 2001; 2:235-258; M. Kokoris, K. Dix, K. Moynihan, J. Mathis, B. Erwin, P. Grass, B. Hines and A. Duesterhoeft, “High-throughput SNP genotyping with the Masscode system,” Mol. Diagn. 2000 December; 5(4):329-340).

[0648] Using the methods described above, thirteen SNP were identified in the transcript for PSCA v.2. Variant 2 was used, rather than for example variant 1, as it had fewer ambiguous bases than variant 1. Accordingly, SNPs were identified in PSCA v.2, at positions 57 (t/c), 367 (c/t), 424 (a/c), 495 (c/g), 499 (c/t), 563 (c/t), 567 (g/a), 627 (g/a), 634 (t/g), 835 (g/a), 847 (g/a), 878 (g/a), and 978 (c/g). The transcripts or proteins with alternative alleles were designated as variant PSCA v.6 through v.18, as shown in Table LVI and FIG. 12a.

[0649] The nucleotide change in v.6 changed the start codon of v.1 and thus, the translation would not start until the next ATG (AUG in mRNA), resulting in a protein 9 AA shorter than v.1 protein (FIG. 11a). The nucleotide changes for v.7 and v.8 were silent at the protein level.

[0650] Twelve of these 13 SNPs were also present in variant 4 as set forth in FIG. 12b and table LVI. The 12 SNP variants relative to PSCA v.4 are designated PSCA v.19 through v.30. Variants 19 through 27 encode alternative amino acids. (FIG. 11b and Table LVI).

[0651] Table LVI also shows the amino acid changes of protein sequence. These SNP, though shown individually separately here, can occur in different combinations and in any one of the transcript variants that contains the site of the SNP.

### Example 7

### Production of Recombinant PSCA in Prokaryotic Systems

[0652] To express recombinant PSCA and PSCA variants in prokaryotic cells, the full or partial length PSCA and PSCA variant cDNA sequences are cloned into any one of a variety of expression vectors known in the art. One or more of the following regions of PSCA variants are expressed: the full length sequence presented in FIGS. 2 and 3, or any 8, 9, 10, 11, 12, 13, 14, 15, 16, 17, 18, 19, 20, 21, 22, 23, 24, 25, 26, 27, 28, 29, 30 or more contiguous amino acids from PSCA, variants, or analogs thereof.

[0653] A. In vitro Transcription and Translation Constructs:

[0654] pCRII: To generate PSCA sense and anti-sense RNA probes for RNA in situ investigations, pCRII constructs (Invitrogen, Carlsbad Calif.) are generated encoding either all or fragments of the PSCA cDNA. The pCRII vector has Sp6 and T7 promoters flanking the insert to drive the transcription of PSCA RNA for use as probes in RNA in situ hybridization experiments. These probes are used to analyze the cell and tissue expression of PSCA at the RNA level. Transcribed PSCA RNA representing the cDNA amino acid coding region of the PSCA gene is used in in vitro translation systems such as the TnT™ Coupled Reticulolysate System (Promega, Corp., Madison, Wis.) to synthesize PSCA protein.

[0655] B. Bacterial Constructs:

[0656] DGEX Constructs: To generate recombinant PSCA proteins in bacteria that are fused to the Glutathione S-transferase (GST) protein, all or parts of the PSCA cDNA protein coding sequence are cloned into the pGEX family of GST-fusion vectors (Amersham Pharmacia Biotech, Piscataway, N.J.). These constructs allow controlled expression of recombinant PSCA protein sequences with GST fused at the amino-terminus and a six histidine epitope (6× His) at the carboxyl-terminus. The GST and 6× His tags permit purification of the recombinant fusion protein from induced bacteria with the appropriate affinity matrix and allow recognition of the fusion protein with anti-GST and anti-His antibodies. The 6× His tag is generated by adding 6 histidine codons to the cloning primer at the 3′ end, e.g., of the open reading frame (ORF). A proteolytic cleavage site, such as the PreScission™ recognition site in pGEX-6P-1, may be employed such that it permits cleavage of the GST tag from PSCA-related protein. The ampicillin resistance gene and pBR322 origin permits selection and maintenance of the pGEX plasmids in E. coli.

[0657] pMAL Constructs: To generate, in bacteria, recombinant PSCA proteins that are fused to maltose-binding protein (MBP), all or parts of the PSCA cDNA protein coding sequence are fused to the MBP gene by cloning into the pMAL-c2X and pMAL-p2X vectors (New England Biolabs, Beverly, Mass.). These constructs allow controlled expression of recombinant PSCA protein sequences with MBP fused at the amino-terminus and a 6× His epitope tag at the carboxyl-terminus. The MBP and 6× His tags permit purification of the recombinant protein from induced bacteria with the appropriate affinity matrix and allow recognition of the fusion protein with anti-MBP and anti-His antibodies. The 6× His epitope tag is generated by adding 6 histidine codons to the 3′ cloning primer. A Factor Xa recognition site permits cleavage of the pMAL tag from PSCA. The pMAL-c2X and pMAL-p2X vectors are optimized to express the recombinant protein in the cytoplasm or periplasm respectively. Periplasm expression enhances folding of proteins with disulfide bonds.

[0658] pET Constructs: To express PSCA in bacterial cells, all or parts of the PSCA cDNA protein coding sequence are cloned into the pET family of vectors (Novagen, Madison, Wis.). These vectors allow tightly controlled expression of recombinant PSCA protein in bacteria with and without fusion to proteins that enhance solubility, such as NusA and thioredoxin (Trx), and epitope tags, such as 6× His and S-Tag™ that aid purification and detection of the recombinant protein. For example, constructs are made utilizing pET NusA fusion system 43.1 such that regions of the PSCA protein are expressed as amino-terminal fusions to NusA.

[0659] C. Yeast Constructs:

[0660] pESC Constructs: To express PSCA in the yeast species Saccharomyces cerevisiae for generation of recombinant protein and functional studies, all or parts of the PSCA cDNA protein coding sequence are cloned into the pESC family of vectors each of which contain 1 of 4 selectable markers, HIS3, TRP1, LEU2, and URA3 (Stratagene, La Jolla, Calif.) These vectors allow controlled expression from the same plasmid of up to 2 different genes or cloned sequences containing either Flag™ or Myc epitope tags in the same yeast cell. This system is useful to confirm protein-protein interactions of PSCA. In addition, expression in yeast yields similar post-translational modifications, such as glycosylations and phosphorylations, that are found when expressed in eukaryotic cells.

[0661] pESP Constructs: To express PSCA in the yeast species Saccharomyces pombe, all or parts of the PSCA cDNA protein coding sequence are cloned into the pESP family of vectors. These vectors allow controlled high level of expression of a PSCA protein sequence that is fused at either the amino terminus or at the carboxyl terminus to GST which aids purification of the recombinant protein. A Flag™ epitope tag allows detection of the recombinant protein with anti-Flag™ antibody.

### Example 8

### Production of Recombinant PSCA in Higher Eukaryotic Systems

[0662] Intentionally Omitted

### Example 9

### Antigenicity Profiles and Secondary Structure

[0663] FIG. 5A-C, FIG. 6A-C, FIG. 7A-C, FIG. 8A-C, and FIG. 9A-C depict graphically five amino acid profiles of PSCA variants 1, 3, and 4, each assessment available by accessing the ProtScale website (URL www.expasy.ch/cgi-bin/protscale.pl) on the ExPasy molecular biology server.

[0664] These profiles: FIG. 5, Hydrophilicity, (Hopp T. P., Woods K. R., 1981. Proc. Natl. Acad. Sci. U.S.A. 78:3824-3828); FIG. 6, Hydropathicity, (Kyte J., Doolittle R. F., 1982. J. Mol. Biol. 157:105-132); FIG. 7, Percentage Accessible Residues (Janin J., 1979 Nature 277:491-492); FIG. 8, Average Flexibility, (Bhaskaran R., and Ponnuswamy P. K., 1988. Int. J. Pept. Protein Res. 32:242-255); FIG. 9, Beta-turn (Deleage, G., Roux B. 1987 Protein Engineering 1:289-294); and optionally others available in the art, such as on the ProtScale website, were used to identify antigenic regions of each of the PSCA variant proteins. Each of the above amino acid profiles of PSCA variants were generated using the following ProtScale parameters for analysis: 1) A window size of 9; 2) 100% weight of the window edges compared to the window center; and, 3) amino acid profile values normalized to lie between 0 and 1.

[0665] Hydrophilicity (FIG. 5), Hydropathicity (FIG. 6) and Percentage Accessible Residues (FIG. 7) profiles were used to determine stretches of hydrophilic amino acids (i.e., values greater than 0.5 on the Hydrophilicity and Percentage Accessible Residues profile, and values less than 0.5 on the Hydropathicity profile). Such regions are likely to be exposed to the aqueous environment, be present on the surface of the protein, and thus available for immune recognition, such as by antibodies.

[0666] Average Flexibility (FIG. 8) and Beta-turn (FIG. 9) profiles determine stretches of amino acids (i.e., values greater than 0.5 on the Beta-turn profile and the Average Flexibility profile) that are not constrained in secondary structures such as beta sheets and alpha helices. Such regions are also more likely to be exposed on the protein and thus accessible to immune recognition, such as by antibodies.

[0667] Antigenic sequences of the PSCA variant proteins indicated, e.g., by the profiles set forth in FIG. 5A-C, FIG. 6A-C, FIG. 7A-C, FIG. 8A-C, and/or FIG. 9A-C are used to prepare immunogens, either peptides or nucleic acids that encode them, to generate therapeutic and diagnostic anti-PSCA antibodies. The immunogen can be any 5, 6, 7, 8, 9, 10, 11, 12, 13, 14, 15, 16, 17, 18, 19, 20, 21, 22, 23, 24, 25, 30, 35, 40, 45, 50 or more than 50 contiguous amino acids, or the corresponding nucleic acids that encode them, from the PSCA protein variants listed in FIGS. 2 and 3 of which the amino acid profiles are shown in FIG. 9, or can be inferred because the variant contains sequence that is the same as a variant depicted in FIG. 9. In particular, peptide immunogens of the invention can comprise, a peptide region of at least 5 amino acids of FIGS. 2 and 3 in any whole number increment that includes an amino acid position having a value greater than 0.5 in the Hydrophilicity profiles of FIG. 5; a peptide region of at least 5 amino acids of FIGS. 2 and 3 in any whole number increment that includes an amino acid position having a value less than 0.5 in the Hydropathicity profile of FIGS. 6; a peptide region of at least 5 amino acids of FIGS. 2 and 3 in any whole number increment that includes an amino acid position having a value greater than 0.5 in the Percent Accessible Residues profiles of FIG. 7; a peptide region of at least 5 amino acids of FIGS. 2 and 3 in any whole number increment that includes an amino acid position having a value greater than 0.5 in the Average Flexibility profiles on FIG. 8; and, a peptide region of at least 5 amino acids of FIGS. 2 and 3 in any whole number increment that includes an amino acid position having a value greater than 0.5 in the Beta-turn profile of FIGS. 9. Peptide immunogens of the invention can also comprise nucleic acids that encode any of the forgoing.

[0668] All immunogens of the invention, peptide or nucleic acid, can be embodied in human unit dose form, or comprised by a composition that includes a pharmaceutical excipient compatible with human physiology.

[0669] The secondary structure of PSCA protein variants 1, 3, 4, and 6, namely the predicted presence and location of alpha helices, extended strands, and random coils, is predicted from the primary amino acid sequence using the HNN—Hierarchical Neural Network method (NPS@: Network Protein Sequence Analysis TIBS 2000 March Vol. 25, No 3 [291]: 147-150 Combet C., Blanchet C., Geourjon C. and Deleage G., http://pbil.ibcp.fr/cgi-bin/npsa_automat.pl?page=npsa_nn.html), accessed from the ExPasy molecular biology server (http://www.expasy.ch/toolsl). The analysis indicates that PSCA variant 1 is composed of 30.89% alpha helix, 21.95% extended strand, and 47.15% random coil (FIG. 13A). PSCA protein variant 3 is composed of 14.89% alpha helix, 8.51% extended strand, and 76.60% random coil (FIG. 13B). PSCA protein variant 4 is composed of 9.52% alpha helix, 8.99% extended strand, and 81.48% random coil (FIG. 13C). PSCA protein variant 6 is composed of 24.56% alpha helix, 21.93% extended strand, and 53.51% random coil (FIG. 13D).

[0670] Analysis for the potential presence of transmembrane domains in the PSCA variant proteins was carried out using a variety of transmembrane prediction algorithms accessed from the ExPasy molecular biology server (http://www.expasy.ch/tools/). Shown graphically in FIGS. 13E, G, I, and K are the results of analyses of variants 1, 3, 4, and 6, respectively, using the TMpred program. Shown graphically in FIGS. 13F, H, J, and L are the results of analyses of variants 1, 3, 4, and 6, respectively using the TMHMM program. PSCA variant 1 and variant 6 proteins are likely to encode GPI-linked proteins. Variants 3 and 4 are likely to encode soluble proteins since they do not contain significant predictions for transmembrane domains. The results of structural analysis programs are summarized in Table VI.

### Example 10

### Generation of PSCA Polyclonal Antibodies

[0671] Polyclonal antibodies can be raised in a mammal, for example, by one or more injections of an immunizing agent and, if desired, an adjuvant. Typically, the immunizing agent and/or adjuvant will be injected in the mammal by multiple subcutaneous or intraperitoneal injections. In addition to immunizing with a full length PSCA protein variant, computer algorithms are employed in design of immunogens that, based on amino acid sequence analysis contain characteristics of being antigenic and available for recognition by the immune system of the immunized host (see the Example entitled “Antigenicity Profiles and Secondary Structure”). Such regions would be predicted to be hydrophilic, flexible, in beta-turn conformations, and be exposed on the surface of the protein (see, e.g., FIG. 5A-C, FIG. 6A-C, FIG. 7A-C, FIG. 8A-C, or FIG. 9A-C for amino acid profiles that indicate such regions of PSCA protein variant 1).

[0672] For example, recombinant bacterial fusion proteins or peptides containing hydrophilic, flexible, beta-turn regions of PSCA protein variants are used as antigens to generate polyclonal antibodies in New Zealand White rabbits or monoclonal antibodies as described in Example 11. For example, in PSCA variant 1, such regions include, but are not limited to, amino acids 28-56 and amino acids 66-94. For variant 3, such regions include, but are not limited to, amino acids 7-39 and amino acids 70-94. For variant 4 such regions include, but are not limited to, amino acids 6-18, amino acids 27-39, amino acids 103-133, and 177-189. For variant 6, such regions include, but are not limited to, amino acids 19-35 and amino acids 57-85. It is useful to conjugate the immunizing agent to a protein known to be immunogenic in the mammal being immunized. Examples of such immunogenic proteins include, but are not limited to, keyhole limpet hemocyanin (KLH), serum albumin, bovine thyroglobulin, and soybean trypsin inhibitor. In one embodiment, a peptide encoding amino acids 103-133 of PSCA variant 4 is conjugated to KLH and used to immunize a rabbit. Alternatively the immunizing agent may include all or portions of the PSCA variant proteins, analogs or fusion proteins thereof. For example, the PSCA variants amino acid sequences can be fused using recombinant DNA techniques to any one of a variety of fusion protein partners that are well known in the art, such as glutathione-S-transferase (GST) and HIS tagged fusion proteins. In one embodiment, the PSCA variant 1 sequence, amino acids 18-98 was fused to GST using recombinant techniques in the pGEX expression vector, expressed, purified and used to immunize both rabbits and mice to generate polyclonal and monoclonal antibodies respectively. Such fusion proteins are purified from induced bacteria using the appropriate affinity matrix.

[0673] Other recombinant bacterial fusion proteins that may be employed include maltose binding protein, LacZ, thioredoxin, NusA, or an immunoglobulin constant region (see the section entitled “Production of PSCA in Prokaryotic Systems” and Current Protocols In Molecular Biology, Volume 2, Unit 16, Frederick M. Ausubul et al. eds., 1995; Linsley, P. S., Brady, W., Urnes, M., Grosmaire, L., Damle, N., and Ledbetter, L.(1991) J. Exp. Med. 174, 561-566).

[0674] In addition to bacterial derived fusion proteins, mammalian expressed protein antigens are also used. These antigens are expressed from mammalian expression vectors such as the Tag5 and Fc-fusion vectors (see the section entitled “Production of Recombinant PSCA in Eukaryotic Systems”), and retain post-translational modifications such as glycosylations found in native protein. In one embodiment, the cDNA of PSCA variant 1, minus the N-terminal leader peptide and C-terminal GPI anchor was cloned into the Tag5 mammalian secretion vector, and expressed in 293T cells. The recombinant protein was purified by metal chelate chromatography from tissue culture supernatants of 293T cells stably expressing the recombinant vector. The purified Tag5 PSCA protein was then used as immunogen.

[0675] During the immunization protocol, it is useful to mix or emulsify the antigen in adjuvants that enhance the immune response of the host animal. Examples of adjuvants include, but are not limited to, complete Freund's adjuvant (CFA) and MPL-TDM adjuvant (monophosphoryl Lipid A, synthetic trehalose dicorynomycolate).

[0676] In a typical protocol, rabbits are initially immunized subcutaneously with up to 200 μg, typically 100-200 μg, of fusion protein or peptide conjugated to KLH mixed in complete Freund's adjuvant (CFA). Rabbits are then injected subcutaneously every two weeks with up to 200 μg, typically 100-200 μg, of the immunogen in incomplete Freund's adjuvant (IFA). Test bleeds are taken approximately 7-10 days following each immunization and used to monitor the titer of the antiserum by ELISA.

[0677] To test reactivity and specificity of immune serum, such as rabbit serum derived from immunization with a GST-fusion of PSCA variant 3 or 4 protein, the respective full-length PSCA variant cDNA is cloned into pCDNA 3.1 myc-his expression vector (Invitrogen, see the Example entitled “Production of Recombinant PSCA in Eukaryotic Systems”). After transfection of the constructs into 293T cells, cell lysates are probed with the anti-variant serum and with anti-His antibody (Santa Cruz Biotechnologies, Santa Cruz, Calif.) to determine specific reactivity to denatured variant protein using the Western blot technique. In addition, the immune serum is tested by fluorescence microscopy, flow cytometry and immunoprecipitation against 293T and other recombinant PSCA variant-expressing cells to determine specific recognition of native protein. Western blot, immunoprecipitation, fluorescent microscopy, and flow cytometric techniques using cells that endogenously express PSCA are also carried out to test reactivity and specificity.

[0678] Anti-serum from rabbits immunized with PSCA variant fusion proteins, such as GST and MBP fusion proteins, are purified by depletion of antibodies reactive to the fusion partner sequence by passage over an affinity column containing the fusion partner either alone or in the context of an irrelevant fusion protein. For example, antiserum derived from a GST-PSCA variant 1 fusion protein is first purified by passage over a column of GST protein covalentiy coupled to AffiGel matrix (BioRad, Hercules, Calif.). The antiserum is then affinity purified by passage over a column composed of a MBP-PSCA fusion protein covalently coupled to Affigel matrix. The serum is then further purified by protein G affinity chromatography to isolate the IgG fraction. Sera from other His-tagged antigens and peptide immunized rabbits as well as fusion partner depleted sera are affinity purified by passage over a column matrix composed of the original protein immunogen or free peptide.

### Example 11

### Generation of PSCA Monoclonal Antibodies (mAbs)

[0679] In one embodiment, therapeutic mAbs to PSCA variants comprise those that react with epitopes specific for each variant protein or specific to sequences in common between the variants that would disrupt or modulate the biological function of the PSCA variants, for example those that would disrupt the interaction with ligands and binding partners. Immunogens for generation of such mAbs include those designed to encode or contain the entire PSCA protein variant sequence, regions of the PSCA protein variants predicted to be antigenic from computer analysis of the amino acid sequence (see, e.g., FIG. 5A-C, FIG. 6A-C, FIG. 7A-C, FIG. 8A-C, or FIG. 9A-C, and the Example entitled “Antigenicity Profiles”). Immunogens include peptides, recombinant bacterial proteins, and mammalian expressed Tag 5 proteins and human and murine IgG FC fusion proteins. In addition, cells engineered to express high levels of a respective PSCA variant, such as 293T-PSCA variant 4 or 300.19-PSCA variant 4 murine Pre-B cells, are used to immunize mice.

[0680] To generate mAbs to a PSCA variant, mice are first immunized intraperitoneally (IP) with, typically, 10-50 μg protein immunogen or 107 PSCA-expressing cells mixed in complete Freund's adjuvant. Mice are then subsequently immunized IP every 2-4 weeks with, typically, 10-50 μg of protein immunogen or 10⁷ cells mixed in incomplete Freund's adjuvant. Alternatively, MPL-TDM adjuvant is used in immunizations. In addition to the above protein and cell-based immunization strategies, a DNA-based immunization protocol is employed in which a mammalian expression vector encoding a PSCA variant sequence is used to immunize mice by direct injection of the plasmid DNA. For example, the complete cDNA of PSCA of variant 4 is cloned into the Tag5 mammalian secretion vector and the recombinant vector will then be used as immunogen. In another example the same amino acids are cloned into an Fc-fusion secretion vector in which the PSCA variant 4 sequence is fused at the amino-terminus to an IgK leader sequence and at the carboxyl-terminus to the coding sequence of the human or murine IgG Fc region. This recombinant vector is then used as immunogen. The plasmid immunization protocols are used in combination with purified proteins expressed from the same vector and with cells expressing the respective PSCA variant.

[0681] During the immunization protocol, test bleeds are taken 7-10 days following an injection to monitor titer and specificity of the immune response. Once appropriate reactivity and specificity is obtained as determined by ELISA, Western blotting, immunoprecipitation, fluorescence microscopy, and flow cytometric analyses, fusion and hybridoma generation is then carried out with established procedures well known in the art (see, e.g., Harlow and Lane, 1988).

[0682] In one embodiment for generating PSCA monoclonal antibodies, a GST-fusion of variant 4 antigen encoding amino acids 1-189 is expressed and then purified from stably transfected 293T cells. Balb C mice are initially immunized intraperitoneally with 25 μg of the GST-PSCA variant 4 protein mixed in complete Freund's adjuvant. Mice are subsequently immunized every two weeks with 25 μg of the antigen mixed in incomplete Freund's adjuvant for a total of three immunizations. ELISA using the GST-fusion antigen and a cleavage product from which the GST portion is removed determines the titer of serum from immunized mice. Reactivity and specificity of serum to full length PSCA variant 4 protein is monitored by Western blotting, immunoprecipitation and flow cytometry using 293T cells transfected with an expression vector encoding the PSCA variant 1 cDNA (see e.g., the Example entitled “Production of Recombinant PSCA in Eukaryotic Systems”). Other recombinant PSCA variant 4-expressing cells or cells endogenously expressing PSCA variant 4 are also used. Mice showing the strongest reactivity are rested and given a final injection of Tag5 antigen in PBS and then sacrificed four days later. The spleens of the sacrificed mice are harvested and fused to SPO/2 myeloma cells using standard procedures (Harlow and Lane, 1988). Supernatants from HAT selected growth wells are screened by ELISA, Western blot, immunoprecipitation, fluorescent microscopy, and flow cytometry to identify PSCA specific antibody-producing clones.

[0683] To generate monoclonal antibodies that are specific for PSCA variant 4 protein, immunogens are designed to encode the sequence unique to that variant. For example, a peptide encoding amino acids 6-18 of PSCA variant 4 is synthesized, conjugated to KLH and used as immunogen. Hybridoma supernatants are then screened on the peptide antigen and then further screened on cells expressing the PSCA variant 4 protein and cross-screened on cells expressing the other PSCA variants to derive variant 4-specific monoclonal antibodies.

[0684] The binding affinity of a PSCA variant monoclonal antibody is determined using standard technologies. Affinity measurements quantify the strength of antibody to epitope binding and are used to help define which PSCA variant monoclonal antibodies preferred for diagnostic or therapeutic use, as appreciated by one of skill in the art. The BIAcore system (Uppsala, Sweden) is a preferred method for determining binding affinity. The BIAcore system uses surface plasmon resonance (SPR, Welford K. 1991, Opt. Quant. Elect. 23:1; Morton and Myszka, 1998, Methods in Enzymology 295: 268) to monitor biomolecular interactions in real time. BIAcore analysis conveniently generates association rate constants, dissociation rate constants, equilibrium dissociation constants, and affinity constants.

### Example 12

### HLA Class I and Class II Binding Assays

[0685] HLA class I and class II binding assays using purified HLA molecules are performed in accordance with disclosed protocols (e.g., PCT publications WO 94/20127 and WO 94/03205; Sidney et al., Current Protocols in Immunology 18.3.1 (1998); Sidney, et al, J. Immunol 154:247 (1995); Selte, et al., Mol. Immunol. 31:813 (1994)). Briefly, purified MHC molecules (5 to 500 nM) are incubated with various unlabeled peptide inhibitors and 1-10 nM ¹²⁵I-radiolabeled probe peptides as described. Following incubation, MHC-peptide complexes are separated from free peptide by gel filtration and the fraction of peptide bound is determined. Typically, in preliminary experiments, each MHC preparation is titered in the presence of fixed amounts of radiolabeled peptides to determine the concentration of HLA molecules necessary to bind 10-20% of the total radioactivity. All subsequent inhibition and direct binding assays are performed using these HLA concentrations.

[0686] Since under these conditions [label]<[HLA] and IC₅₀≧[HLA], the measured IC₅₀ values are reasonable approximations of the true K_{D} values. Peptide inhibitors are typically tested at concentrations ranging from 120 μg/ml to 1.2 ng/ml, and are tested in two to four completely independent experiments. To allow comparison of the data obtained in different experiments, a relative binding figure is calculated for each peptide by dividing the IC₅₀ of a positive control for inhibition by the IC₅₀ for each tested peptide (typically unlabeled versions of the radiolabeled probe peptide). For database purposes, and inter-experiment comparisons, relative binding values are compiled. These values can subsequently be converted back into IC₅₀ nM values by dividing the IC₅₀ nM of the positive controls for inhibition by the relative binding of the peptide of interest. This method of data compilation is accurate and consistent for comparing peptides that have been tested on different days, or with different lots of purified MHC.

[0687] Binding assays as outlined above may be used to analyze HLA supermotif and/or HLA motif-bearing peptides (see Table IV).

### Example 13

### Identification of HLA Supermotif- and Motif-Bearing CTL Candidate Epitopes

[0688] HLA vaccine compositions of the invention can include multiple epitopes. The multiple epitopes can comprise multiple HLA supermotifs or motifs to achieve broad population coverage. This example illustrates the identification and confirmation of supermotif- and motif-bearing epitopes for the inclusion in such a vaccine composition. Calculation of population coverage is performed using the strategy described below.

[0689] Computer Searches and Algorithms for Identification of Supermotif and/or Motif-Bearing Epitopes

[0690] The searches performed to identify the motif-bearing peptide sequences in the Example entitled “Antigenicity Profiles” and Tables VIII-XXI and XXII-XLIX employ the protein sequence data from the gene product of PSCA set forth in FIGS. 2 and 3, the specific search peptides used to generate the tables are listed in Table VII.

[0691] Computer searches for epitopes bearing HLA Class I or Class II supermotifs or motifs are performed as follows. All translated PSCA protein sequences are analyzed using a text string search software program to identify potential peptide sequences containing appropriate HLA binding motifs; such programs are readily produced in accordance with information in the art in view of known motif/supermotif disclosures. Furthermore, such calculations can be made mentally.

[0692] Identified A2-, A3-, and DR-supermotif sequences are scored using polynomial algorithms to predict their capacity to bind to specific HLA-Class I or Class II molecules. These polynomial algorithms account for the impact of different amino acids at different positions, and are essentially based on the premise that the overall affinity (or ΔG) of peptide-HLA molecule interactions can be approximated as a linear polynomial function of the type:
“ΔG”=a₁ᵢ×a₂ᵢ×a₃ᵢ . . . ×aₙᵢ

[0693] where aⱼᵢ is a coefficient which represents the effect of the presence of a given amino acid (j) at a given position (i) along the sequence of a peptide of n amino acids. The crucial assumption of this method is that the effects at each position are essentially independent of each other (i.e., independent binding of individual side-chains). When residue j occurs at position i in the peptide, it is assumed to contribute a constant amount jᵢ to the free energy of binding of the peptide irrespective of the sequence of the rest of the peptide.

[0694] The method of derivation of specific algorithm coefficients has been described in Gulukota et al., J. Mol. Biol. 267:1258-126, 1997; (see also Sidney et al., Human Immunol. 45:79-93, 1996; and Southwood et al., J. Immunol. 160:3363-3373, 1998). Briefly, for all i positions, anchor and non-anchor alike, the geometric mean of the average relative binding (ARB) of all peptides carrying j is calculated relative to the remainder of the group, and used as the estimate of jᵢ. For Class II peptides, if multiple alignments are possible, only the highest scoring alignment is utilized, following an iterative procedure. To calculate an algorithm score of a given peptide in a test set, the ARB values corresponding to the sequence of the peptide are multiplied. If this product exceeds a chosen threshold, the peptide is predicted to bind. Appropriate thresholds are chosen as a function of the degree of stringency of prediction desired.

[0695] Selection of HLA-A2 Supertype Cross-Reactive Peptides

[0696] Protein sequences from PSCA are scanned utilizing motif identification software, to identify 8-, 9-10- and 11-mer sequences containing the HLA-A2-supermotif main anchor specificity. Typically, these sequences are then scored using the protocol described above and the peptides corresponding to the positive-scoring sequences are synthesized and tested for their capacity to bind purified HLA-A*0201 molecules in vitro (HLA-A*0201 is considered a prototype A2 supertype molecule).

[0697] These peptides are then tested for the capacity to bind to additional A2-supertype molecules (A*0202, A*0203, A*0206, and A*6802). Peptides that bind to at least three of the five A2-supertype alleles tested are typically deemed A2-supertype cross-reactive binders. Preferred peptides bind at an affinity equal to or less than 500 nM to three or more HLA-A2 supertype molecules.

[0698] Selection of HLA-A3 Supermotif-Bearing Epitopes

[0699] The PSCA protein sequence(s) scanned above is also examined for the presence of peptides with the HLA-A3-supermotif primary anchors. Peptides corresponding to the HLA A3 supermotif-bearing sequences are then synthesized and tested for binding to HLA-A*0301 and HLA-A*1101 molecules, the molecules encoded by the two most prevalent A3-supertype alleles. The peptides that bind at least one of the two alleles with binding affinities of ≦500 nM, often ≦200 nM, are then tested for binding cross-reactivity to the other common A3-supertype alleles (e.g., A*3101, A*3301, and A*6801) to identify those that can bind at least three of the five HLA-A3-supertype molecules tested.

[0700] Selection of HLA-B7 Supermotif Bearing Epitopes

[0701] The PSCA protein(s) scanned above is also analyzed for the presence of 8-, 9-10-, or 11-mer peptides with the HLA-B7-supermotif. Corresponding peptides are synthesized and tested for binding to HLA-B*0702, the molecule encoded by the most common B7-supertype allele (i.e., the prototype B7 supertype allele). Peptides binding B*0702 with IC₅₀ of ≦500 nM are identified using standard methods. These peptides are then tested for binding to other common B7-supertype molecules (e.g., B*3501, B*5101, B*5301, and B*5401). Peptides capable of binding to three or more of the five B7-supertype alleles tested are thereby identified.

[0702] Selection of A1 and A24 Motif-Bearing Epitopes

[0703] To further increase population coverage, HLA-A1 and -A24 epitopes can also be incorporated into vaccine compositions. An analysis of the PSCA protein can also be performed to identify HLA-A1- and A24-motif-containing sequences.

[0704] High affinity and/or cross-reactive binding epitopes that bear other motif and/or supermotifs are identified using analogous methodology.

### Example 14

### Confirmation of Immunogenicity

[0705] Cross-reactive candidate CTL A2-supermotif-bearing peptides that are identified as described herein are selected to confirm in vitro immunogenicity. Confirmation is performed using the following methodology:

[0706] Target Cell Lines for Cellular Screening:

[0707] The .221A2.1 cell line, produced by transferring the HLA-A2.1 gene into the HLA-A, -B, -C null mutant human B-lymphoblastoid cell line 721.221, is used as the peptide-loaded target to measure activity of HLA-A2.1-restricted CTL. This cell line is grown in RPMI-1640 medium supplemented with antibiotics, sodium pyruvate, nonessential amino acids and 10% (v/v) heat inactivated FCS. Cells that express an antigen of interest, or transfectants comprising the gene encoding the antigen of interest, can be used as target cells to confirm the ability of peptide-specific CTLs to recognize endogenous antigen.

[0708] Primary CTL Induction Cultures:

[0709] Generation of Dendritic Cells (DC): PBMCs are thawed in RPMI with 30 μg/ml DNAse, washed twice and resuspended in complete medium (RPMI-1640 plus 5% AB human serum, non-essential amino acids, sodium pyruvate, L-glutamine and penicillin/streptomycin). The monocytes are purified by plating 10×10⁶ PBMC/well in a 6-well plate. After 2 hours at 37° C., the non-adherent cells are removed by gently shaking the plates and aspirating the supernatants. The wells are washed a total of three times with 3 ml RPMI to remove most of the non-adherent and loosely adherent cells. Three ml of complete medium containing 50 ng/ml of GM-CSF and 1,000 U/ml of IL-4 are then added to each well. TNFα is added to the DCs on day 6 at 75 ng/ml and the cells are used for CTL induction cultures on day 7.

[0710] Induction of CTL with DC and Peptide: CD8+ T-cells are isolated by positive selection with Dynal immunomagnetic beads (Dynabeads® M-450) and the detacha-bead® reagent. Typically about 200-250×10⁶ PBMC are processed to obtain 24×10⁶ CD8⁺ T-cells (enough for a 48-well plate culture). Briefly, the PBMCs are thawed in RPMI with 30 μg/ml DNAse, washed once with PBS containing 1% human AB serum and resuspended in PBS/1% AB serum at a concentration of 20×10⁶ cells/ml. The magnetic beads are washed 3 times with PBS/AB serum, added to the cells (140 μl beads/20×10⁶ cells) and incubated for 1 hour at 4° C. with continuous mixing. The beads and cells are washed 4× with PBS/AB serum to remove the nonadherent cells and resuspended at 100×10⁶ cells/ml (based on the original cell number) in PBS/AB serum containing 100 μl/ml detacha-bead® reagent and 30 μg/ml DNAse. The mixture is incubated for 1 hour at room temperature with continuous mixing. The beads are washed again with PBS/AB/DNAse to collect the CD8+ T-cells. The DC are collected and centrifuged at 1300 rpm for 5-7 minutes, washed once with PBS with 1% BSA, counted and pulsed with 40 μg/ml of peptide at a cell concentration of 1-2×10⁶/ml in the presence of 3 μg/ml β₂-microglobulin for 4 hours at 20° C. The DC are then irradiated (4,200 rads), washed 1 time with medium and counted again.

[0711] Setting up induction cultures: 0.25 ml cytokine-generated DC (at 1×10⁵ cells/ml) are co-cultured with 0.25 ml of CD8+ T-cells (at 2×10⁶ cell/ml) in each well of a 48-well plate in the presence of 10 ng/ml of IL-7. Recombinant human IL-10 is added the next day at a final concentration of 10 ng/ml and rhuman IL-2 is added 48 hours later at 10 IU/ml.

[0712] Restimulation of the induction cultures with peptide-pulsed adherent cells: Seven and fourteen days after the primary induction, the cells are restimulated with peptide-pulsed adherent cells. The PBMCs are thawed and washed twice with RPMI and DNAse. The cells are resuspended at 5×10⁶ cells/ml and irradiated at ˜4200 rads. The PBMCs are plated at 2×10⁶ in 0.5 ml complete medium per well and incubated for 2 hours at 37° C. The plates are washed twice with RPMI by tapping the plate gently to remove the nonadherent cells and the adherent cells pulsed with 10 μg/ml of peptide in the presence of 3 μg/ml β₂ microglobulin in 0.25 ml RPMI/5% AB per well for 2 hours at 37° C. Peptide solution from each well is aspirated and the wells are washed once with RPMI. Most of the media is aspirated from the induction cultures (CD8+ cells) and brought to 0.5 ml with fresh media. The cells are then transferred to the wells containing the peptide-pulsed adherent cells. Twenty four hours later recombinant human IL-10 is added at a final concentration of 10 ng/ml and recombinant human IL2 is added the next day and again 2-3 days later at 50 IU/ml (Tsai et al., Critical Reviews in Immunology 18(1-2):65-75, 1998). Seven days later, the cultures are assayed for CTL activity in a ⁵¹Cr release assay. In some experiments the cultures are assayed for peptide-specific recognition in the in situ IFNγ ELISA at the time of the second restimulabon followed by assay of endogenous recognition 7 days later. After expansion, activity is measured in both assays for a side-by-side comparison.

[0713] Measurement of CTL Lytic Activity by ⁵¹Cr Release.

[0714] Seven days after the second restimulabon, cytotoxicity is determined in a standard (5 hr) ⁵¹Cr release assay by assaying individual wells at a single E:T. Peptide-pulsed targets are prepared by incubating the cells with 10 μg/ml peptide overnight at 37° C.

[0715] Adherent target cells are removed from culture flasks with trypsin-EDTA. Target cells are labeled with 200 μCi of ⁵¹Cr sodium chromate (Dupont, Wilmington, Del.) for 1 hour at 37° C. Labeled target cells are resuspended at 10⁶ per ml and diluted 1:10 with K562 cells at a concentration of 3.3×10⁶/ml (an NK-sensitive erythroblastoma cell line used to reduce non-specific lysis). Target cells (100 μl) and effectors (100 μl) are plated in 96 well round-bottom plates and incubated for 5 hours at 37° C. At that time, 100 μl of supernatant are collected from each well and percent lysis is determined according to the formula:
[(cpm of the test sample−cpm of the spontaneous ⁵¹Cr release sample)/(cpm of the maximal ⁵¹Cr release sample−cpm of the spontaneous ⁵¹Cr release sample)]×100.

[0716] Maximum and spontaneous release are determined by incubating the labeled targets with 1% Tnton X-100 and media alone, respectively. A positive culture is defined as one in which the specific lysis (sample-background) is 10% or higher in the case of individual wells and is 15% or more at the two highest E:T ratios when expanded cultures are assayed.

[0717] In situ Measurement of Human IFNγ Production as an Indicator of Peptide-Specific and Endogenous Recognition

[0718] Immulon 2 plates are coated with mouse anti-human IFNγ monoclonal antibody (4 μg/ml 0.1M NaHCO₃, pH8.2) overnight at 4° C. The plates are washed with Ca²⁺, Mg²⁺-free PBS/0.05% Tween 20 and blocked with PBS/10% FCS for two hours, after which the CTLs (100 μl/well) and targets (100 μl/well) are added to each well, leaving empty wells for the standards and blanks (which received media only). The target cells, either peptide-pulsed or endogenous targets, are used at a concentration of 1×10⁶ cells/ml. The plates are incubated for 48 hours at 37° C. with 5% CO₂.

[0719] Recombinant human IFN-gamma is added to the standard wells starting at 400 pg or 1200 pg/100 microliter/well and the plate incubated for two hours at 37° C. The plates are washed and 100 μl of biotinylated mouse anti-human IFN-gamma monoclonal antibody (2 microgram/ml in PBS/3% FCS/0.05% Tween 20) are added and incubated for 2 hours at room temperature. After washing again, 100 microliter HRP-streptavidin (1:4000) are added and the plates incubated for one hour at room temperature. The plates are then washed 6× with wash buffer, 100 microliter/well developing solution (TMB 1:1) are added, and the plates allowed to develop for 5-15 minutes. The reaction is stopped with 50 microliter/well 1M H₃PO₄ and read at OD450. A culture is considered positive if it measured at least 50 pg of IFN-gamma/well above background and is twice the background level of expression.

[0720] CTL Expansion.

[0721] Those cultures that demonstrate specific lytic activity against peptide-pulsed targets and/or tumor targets are expanded over a two week period with anti-CD3. Briefly, 5×10⁴ CD8+ cells are added to a T25 flask containing the following: 1×10⁶ irradiated (4,200 rad) PBMC (autologous or allogeneic) per ml, 2×10⁵ irradiated (8,000 rad) EBV-transformed cells per ml, and OKT3 (anti-CD3) at 30 ng per ml in RPMI-1640 containing 10% (v/v) human AB serum, non-essential amino acids sodium pyruvate, 25 μM 2-mercaptoethanol, L-glutamine and penicillin/streptomycin. Recombinant human IL2 is added 24 hours later at a final concentration of 200 IU/ml and every three days thereafter with fresh media at 50 IU/ml. The cells are split if the cell concentration exceeds 1×10⁶/ml and the cultures are assayed between days 13 and 15 at E:T ratios of 30, 10, 3 and 1:1 in the ⁵¹Cr release assay or at 1×10⁶/ml in the in situ IFNγ assay using the same targets as before the expansion.

[0722] Cultures are expanded in the absence of anti-CD3⁺ as follows. Those cultures that demonstrate specific lytic activity against peptide and endogenous targets are selected and 5×10⁴ CD8⁺ cells are added to a T25 flask containing the following: 1×10⁶ autologous PBMC per ml which have been peptide-pulsed with 10 μg/ml peptide for two hours at 37° C. and irradiated (4,200 rad); 2×10⁵ irradiated (8,000 rad) EBV-transformed cells per ml RPMI-1640 containing 10% (v/v) human AB serum, non-essential AA, sodium pyruvate, 25 mM 2-ME, L-glutamine and gentamicin.

[0723] Immunogenicity of A2 Supermotif-Bearing Peptides

[0724] A2-supermotif cross-reactive binding peptides are tested in the cellular assay for the ability to induce peptide-specific CTL in normal individuals. In this analysis, a peptide is typically considered to be an epitope if it induces peptide-specific CTLs in at least individuals, and preferably, also recognizes the endogenously expressed peptide.

[0725] Immunogenicity can also be confirmed using PBMCs isolated from patients bearing a tumor that expresses PSCA. Briefly, PBMCs are isolated from patients, re-stimulated with peptide-pulsed monocytes and assayed for the ability to recognize peptide-pulsed target cells as well as transfected cells endogenously expressing the antigen.

[0726] Evaluation of A*03/A11 Immunogenicity

[0727] HLA-A3 supermotif-bearing cross-reactive binding peptides are also evaluated for immunogenicity using methodology analogous for that used to evaluate the immunogenicity of the HLA-A2 supermotif peptides.

[0728] Evaluation of B7 Immunogenicity

[0729] Immunogenicity screening of the B7-supertype cross-reactive binding peptides identified as set forth herein are confirmed in a manner analogous to the confirmation of A2- and A3-supermotif-bearng peptides.

[0730] Peptides bearing other supermotifs/motifs, e.g., HLA-A1, HLA-A24 etc. are also confirmed using similar methodology.

### Example 15

### Implementation of the Extended Supermotif to Improve the Binding Capacity of Native Epitopes by Creating Analogs

[0731] HLA motifs and supermotifs (comprising primary and/or secondary residues) are useful in the identification and preparation of highly cross-reactive native peptides, as demonstrated herein. Moreover, the definition of HLA motifs and supermotifs also allows one to engineer highly cross-reactive epitopes by identifying residues within a native peptide sequence which can be analoged to confer upon the peptide certain characteristics, e.g. greater cross-reactivity within the group of HLA molecules that comprise a supertype, and/or greater binding affinity for some or all of those HLA molecules. Examples of analoging peptides to exhibit modulated binding affinity are set forth in this example.

[0732] Analoging at Primary Anchor Residues

[0733] Peptide engineering strategies are implemented to further increase the cross-reactvity of the epitopes. For example, the main anchors of A2-supermotif-bearing peptides are altered, for example, to introduce a preferred L, I, V, or M at position 2, and I or V at the C-terminus.

[0734] To analyze the cross-reactivity of the analog peptides, each engineered analog is initially tested for binding to the prototype A2 supertype allele A*0201, then, if A*0201 binding capacity is maintained, for A2-supertype cross-reactivity.

[0735] Alternatively, a peptide is confirmed as binding one or all supertype members and then analoged to modulate binding affinity to any one (or more) of the supertype members to add population coverage.

[0736] The selection of analogs for immunogenicity in a cellular screening analysis is typically further restricted by the capacity of the parent wild type (WT) peptide to bind at least weakly, i.e., bind at an IC₅₀ of 5000 nM or less, to three of more A2 supertype alleles. The rationale for this requirement is that the WT peptides must be present endogenously in sufficient quantity to be biologically relevant. Analoged peptides have been shown to have increased immunogenicity and cross-reactivity by T cells specific for the parent epitope (see, e.g., Parkhurst et al., J. Immunol. 157:2539, 1996; and Pogue et al., Proc. Natl. Acad. Sci. USA 92:8166, 1995).

[0737] In the cellular screening of these peptide analogs, it is important to confirm that analog-specific CTLs are also able to recognize the wild-type peptide and, when possible, target cells that endogenously express the epitope.

[0738] Analoging of HLA-A3 and B7-Supermotif-Bearing Peptides

[0739] Analogs of HLA-A3 supermotif-bearing epitopes are generated using strategies similar to those employed in analoging HLA-A2 supermotif-bearing peptides. For example, peptides binding to ⅗ of the A3-supertype molecules are engineered at primary anchor residues to possess a preferred residue (V, S, M, or A) at position 2.

[0740] The analog peptides are then tested for the ability to bind A*03 and A*11 (prototype A3 supertype alleles). Those peptides that demonstrate ≦500 nM binding capacity are then confirmed as having A3-supertype cross-reactivity.

[0741] Similarly to the A2- and A3-motif bearing peptides, peptides binding 3 or more B7-supertype allele improved, where possible, to achieve increased cross-reactive binding or greater binding affinity or binding half life. B7 supermotif-bearing peptides are, for example, engineered to possess a preferred residue (V, I, L, or F) at the C-terminal primary anchor position, as demonstrated by Sidney et al. (J. Immunol. 157:3480-3490, 1996).

[0742] Analoging at primary anchor residues of other motif and/or supermotif-bearing epitopes is performed in a like manner.

[0743] The analog peptides are then be confirmed for immunogenicity, typically in a cellular screening assay. Again, it is generally important to demonstrate that analog-specific CTLs are also able to recognize the wild-type peptide and, when possible, targets that endogenously express the epitope.

[0744] Analogina at Secondary Anchor Residues

[0745] Moreover, HLA supermotifs are of value in engineering highly cross-reactive peptides and/or peptides that bind HLA molecules with increased affinity by identifying particular residues at secondary anchor positions that are associated with such properties. For example, the binding capacity of a B7 supermotif-bearing peptide with an F residue at position 1 is analyzed. The peptide is then analoged to, for example, substitute L for F at position 1. The analoged peptide is evaluated for increased binding affinity, binding half life and/or increased cross-reactivity. Such a procedure identifies analoged peptides with enhanced properties.

[0746] Engineered analogs with sufficiently improved binding capacity or cross-reactivity can also be tested for immunogenicity in HLA-B7-transgenic mice, following for example, IFA immunization or lipopeptide immunization. Analoged peptides are additionally tested for the ability to stimulate a recall response using PBMC from patients with PSCA-expressing tumors.

[0747] Other Analoging Strategies

[0748] Another form of peptide analoging, unrelated to anchor positions, involves the substitution of a cysteine with α-amino butyric acid. Due to its chemical nature, cysteine has the propensity to form disulfide bridges and sufficiently alter the peptide structurally so as to reduce binding capacity. Substitution of a-amino butyric acid for cysteine not only alleviates this problem, but has been shown to improve binding and crossbinding capabilities in some instances (see, e.g., the review by Sette et al., In: Persistent Viral Infections, Eds. R. Ahmed and I. Chen, John Wiley & Sons, England, 1999).

[0749] Thus, by the use of single amino acid substitutions, the binding properties and/or cross-reactivity of peptide ligands for HLA supertype molecules can be modulated.

### Example 16

### Identification and Confirmation of PSCA-Derived Sequences with HLA-DR Binding Motifs

[0750] Peptide epitopes bearing an HLA class II supermotif or motif are identified and confirmed as outlined below using methodology similar to that described for HLA Class I peptides.

[0751] Selection of HLA-DR-Supermotif-Bearing Epitopes.

[0752] To identify PSCA-derived, HLA class II HTL epitopes, a PSCA antigen is analyzed for the presence of sequences bearing an HLA-DR-motif or supermotif. Specifically, 15-mer sequences are selected comprising a DR-supermotif, comprising a 9-mer core, and three-residue N— and C-terminal flanking regions (15 amino acids total).

[0753] Protocols for predicting peptide binding to DR molecules have been developed (Southwood et al, J. Immunol. 160:3363-3373, 1998). These protocols, specific for individual DR molecules, allow the scoring, and ranking, of 9-mer core regions. Each protocol not only scores peptide sequences for the presence of DR-supermotif primary anchors (i.e., at position 1 and position 6) within a 9-mer core, but additionally evaluates sequences for the presence of secondary anchors. Using allele-specific selection tables (see, e.g., Southwood et al., ibid.), it has been found that these protocols efficiently select peptide sequences with a high probability of binding a particular DR molecule. Additionally, it has been found that performing these protocols in tandem, specifically those for DR1, DR4w4, and DR7, can efficiently select DR cross-reactive peptides.

[0754] The PSCA-derived peptides identified above are tested for their binding capacity for various common HLA-DR molecules. All peptides are initially tested for binding to the DR molecules in the primary panel: DR1, DR4w4, and DR7. Peptides binding at least two of these three DR molecules are then tested for binding to DR2w2 β1, DR2w2 β2, DR6w19, and DR9 molecules in secondary assays. Finally, peptides binding at least two of the four secondary panel DR molecules, and thus cumulatively at least four of seven different DR molecules, are screened for binding to DR4w15, DR5w11, and DR8w2 molecules in tertiary assays. Peptides binding at least seven of the ten DR molecules comprising the primary, secondary, and tertiary screening assays are considered cross-reactive DR binders. PSCA-derived peptides found to bind common HLA-DR alleles are of particular interest.

[0755] Selection of DR3 Motif Peptides

[0756] Because HLA-DR3 is an allele that is prevalent in Caucasian, Black, and Hispanic populations, DR3 binding capacity is a relevant criterion in the selection of HTL epitopes. Thus, peptides shown to be candidates may also be assayed for their DR3 binding capacity. However, in view of the binding specificity of the DR3 motif, peptides binding only to DR3 can also be considered as candidates for inclusion in a vaccine formulation.

[0757] To efficiently identify peptides that bind DR3, target PSCA antigens are analyzed for sequences carrying one of the two DR3-specific binding motifs reported by Geluk et al. (J. Immunol. 152:5742-5748, 1994). The corresponding peptides are then synthesized and confirmed as having the ability to bind DR3 with an affinity of 1 μM or better, i.e., less than 1 μM. Peptides are found that meet this binding criterion and qualify as HLA class II high affinity binders.

[0758] DR3 binding epitopes identified in this manner are included in vaccine compositions with DR supermotif-bearing peptide epitopes.

[0759] Similarly to the case of HLA class I motif-bearing peptides, the class II motif-bearing peptides are analoged to improve affinity or cross-reactivity. For example, aspartic acid at position 4 of the 9-mer core sequence is an optimal residue for DR3 binding, and substitution for that residue often improves DR 3 binding.

### Example 17

### Immunogenicity of PSCA-Derived HTL Epitopes

[0760] This example determines immunogenic DR supermotif- and DR3 motif-bearing epitopes among those identified using the methodology set forth herein.

[0761] Immunogenicity of HTL epitopes are confirmed in a manner analogous to the determination of immunogenicity of CTL epitopes, by assessing the ability to stimulate HTL responses and/or by using appropriate transgenic mouse models. Immunogenicity is determined by screening for: 1.) in vitro primary induction using normal PBMC or 2.) recall responses from patients who have PSCA-expressing tumors.

### Example 18

### Calculation of Phenotypic Frequencies of HLA-Supertypes in Various Ethnic Backgrounds to Determine Breadth of Population Coverage

[0762] This example illustrates the assessment of the breadth of population coverage of a vaccine composition comprised of multiple epitopes comprising multiple supermotifs and/or motifs.

[0763] In order to analyze population coverage, gene frequencies of HLA alleles are determined. Gene frequencies for each HLA allele are calculated from antigen or allele frequencies utilizing the binomial distribution formulae gf=1−(SQRT(1−af) (see, e.g., Sidney et al., Human Immunol. 45:79-93,1996). To obtain overall phenotypic frequencies, cumulative gene frequencies are calculated, and the cumulative antigen frequencies derived by the use of the inverse formula [af=1−(1−Cgf)²].

[0764] Where frequency data is not available at the level of DNA typing, correspondence to the serologically defined antigen frequencies is assumed. To obtain total potential supertype population coverage no linkage disequilibrium is assumed, and only alleles confirmed to belong to each of the supertypes are included (minimal estimates). Estimates of total potential coverage achieved by inter-loci combinations are made by adding to the A coverage the proportion of the non-A covered population that could be expected to be covered by the B alleles considered (e.g., total=A+B*(1−A)). Confirmed members of the A3-like supertype are A3, A11, A31, A*3301, and A*6801. Although the A3-like supertype may also include A34, A66, and A*7401, these alleles were not included in overall frequency calculations. Likewise, confirmed members of the A2-like supertype family are A*0201, A*0202, A*0203, A*0204, A*0205, A*0206, A*0207, A*6802, and A*6901. Finally, the B7-like supertype-confirmed alleles are: B7, B*3501-03, B51, B*5301, B*5401, B*5501-2, B*5601, B*6701, and B*7801 (potentially also B*1401, B*3504-06, B*4201, and B*5602).

[0765] Population coverage achieved by combining the A2-, A3- and B7-supertypes is approximately 86% in five major ethnic groups. Coverage may be extended by including peptides bearing the A1 and A24 motifs. On average, A1 is present in 12% and A24 in 29% of the population across five different major ethnic groups (Caucasian, North American Black, Chinese, Japanese, and Hispanic). Together, these alleles are represented with an average frequency of 39% in these same ethnic populations. The total coverage across the major ethnicities when A1 and A24 are combined with the coverage of the A2-, A3- and B7-supertype alleles is >95%, see, e.g., Table IV (G). An analogous approach can be used to estimate population coverage achieved with combinations of class II motif-bearing epitopes.

[0766] Immunogenicity studies in humans (e.g., Bertoni et al., J. Clin. Invest. 100:503,1997; Doolan et al., Immunity 7:97, 1997; and Threlkeld et al., J. Immunol. 159:1648, 1997) have shown that highly cross-reactive binding peptides are almost always recognized as epitopes. The use of highly cross-reactive binding peptides is an important selection criterion in identifying candidate epitopes for inclusion in a vaccine that is immunogenic in a diverse population.

[0767] With a sufficient number of epitopes (as disclosed herein and from the art), an average population coverage is predicted to be greater than 95% in each of five major ethnic populations. The game theory Monte Carlo simulation analysis, which is known in the art (see e.g., Osborne, M. J. and Rubinstein, A. “A course in game theory” MIT Press, 1994), can be used to estimate what percentage of the individuals in a population comprised of the Caucasian, North American Black, Japanese, Chinese, and Hispanic ethnic groups would recognize the vaccine epitopes described herein. A preferred percentage is 90%. A more preferred percentage is 95%.

### Example 19

### CTL Recognition of Endogenously Processed Antigens After Priming

[0768] This example confirms that CTL induced by native or analoged peptide epitopes identified and selected as described herein recognize endogenously synthesized, i.e., native antigens.

[0769] Effector cells isolated from transgenic mice that are immunized with peptide epitopes, for example HLA-A2 supermotif-bearing epitopes, are re-stimulated in vitro using peptide-coated stimulator cells. Six days later, effector cells are assayed for cytotoxicity and the cell lines that contain peptide-specific cytotoxic activity are further re-stimulated. An additional six days later, these cell lines are tested for cytotoxic activity on ⁵¹Cr labeled Jurkat-A2.1/K^{b} target cells in the absence or presence of peptide, and also tested on ⁵¹Cr labeled target cells bearing the endogenously synthesized antigen, i.e. cells that are stably transfected with PSCA expression vectors.

[0770] The results demonstrate that CTL lines obtained from animals primed with peptide epitope recognize endogenously synthesized PSCA antigen. The choice of transgenic mouse model to be used for such an analysis depends upon the epitope(s) that are being evaluated. In addition to HLA-A*0201/K^{b} transgenic mice, several other transgenic mouse models including mice with human A11, which may also be used to evaluate A3 epitopes, and B7 alleles have been characterized and others (e.g., transgenic mice for HLA-A1 and A24) are being developed. HLA-DR1 and HLA-DR3 mouse models have also been developed, which may be used to evaluate HTL epitopes.

### Example 20

### Activity of CTL-HTL Conjugated Epitopes in Transgenic Mice

[0771] This example illustrates the induction of CTLs and HTLs in transgenic mice, by use of a PSCA-derived CTL and HTL peptide vaccine compositions. The vaccine composition used herein comprise peptides to be administered to a patient with a PSCA-expressing tumor. The peptide composition can comprise multiple CTL and/or HTL epitopes. The epitopes are identified using methodology as described herein. This example also illustrates that enhanced immunogenicity can be achieved by inclusion of one or more HTL epitopes in a CTL vaccine composition; such a peptide composition can comprise an HTL epitope conjugated to a CTL epitope. The CTL epitope can be one that binds to multiple HLA family members at an affinity of 500 nM or less, or analogs of that epitope. The peptides may be lipidated, if desired.

[0772] Immunization procedures: Immunization of transgenic mice is performed as described (Alexander et al., J. Immunol. 159:4753-4761, 1997). For example, A2/K^{b} mice, which are transgenic for the human HLA A2.1 allele and are used to confirm the immunogenicity of HLA-A*0201 motif- or HLA-A2 supermotif-bearing epitopes, and are primed subcutaneously (base of the tail) with a 0.1 ml of peptide in Incomplete Freund's Adjuvant, or if the peptide composition is a lipidated CTL/HTL conjugate, in DMSO/saline, or if the peptide composition is a polypeptide, in PBS or Incomplete Freund's Adjuvant. Seven days after priming, splenocytes obtained from these animals are restimulated with syngenic irradiated LPS-activated lymphoblasts coated with peptide.

[0773] Cell lines: Target cells for peptide-specific cytotoxicity assays are Jurkat cells transfected with the HLA-A2.1/K^{b} chimeric gene (e.g., Vitiello et al., J. Exp. Med. 173:1007, 1991)

[0774] In vitro CTL activation: One week after priming, spleen cells (30×10⁶ cells/flask) are co-cultured at 37° C. with syngeneic, irradiated (3000 rads), peptide coated lymphoblasts (10×10⁶ cells/flask) in 10 ml of culture medium/T25 flask. After six days, effector cells are harvested and assayed for cytotoxic activity.

[0775] Assay for cytotoxic activity: Target cells (1.0 to 1.5×10⁶) are incubated at 37° C. in the presence of 200 μl of ⁵¹Cr. After 60 minutes, cells are washed three times and resuspended in R10 medium. Peptide is added where required at a concentration of 1 μg/ml. For the assay, 10^{4 51}Cr-labeled target cells are added to different concentrations of effector cells (final volume of 200 μl) in U-bottom 96-well plates. After a six hour incubation period at 37° C., a 0.1 ml aliquot of supernatant is removed from each well and radioactivity is determined in a Micromedic automatic gamma counter. The percent specific lysis is determined by the formula: percent specific release=100×(experimental release−spontaneous release)/(maximum release−spontaneous release). To facilitate comparison between separate CTL assays run under the same conditions, % ⁵¹Cr release data is expressed as lytic units/10⁶ cells. One lytic unit is arbitrarily defined as the number of effector cells required to achieve 30% lysis of 10,000 target cells in a six hour ⁵¹Cr release assay. To obtain specific lytic units/10⁶, the lytic units/10⁶ obtained in the absence of peptide is subtracted from the lytic units/10⁶ obtained in the presence of peptide. For example, if 30% ⁵¹Cr release is obtained at the effector (E): target (T) ratio of 50:1 (i.e., 5×10⁵ effector cells for 10,000 targets) in the absence of peptide and 5:1 (i.e., 5×10⁴ effector cells for 10,000 targets) in the presence of peptide, the specific lytic units would be: [( 1/50,000)−( 1/500,000)]×10⁶=18 LU.

[0776] The results are analyzed to assess the magnitude of the CTL responses of animals injected with the immunogenic CTUHTL conjugate vaccine preparation and are compared to the magnitude of the CTL response achieved using, for example, CTL epitopes as outlined above in the Example entitled “Confirmation of Immunogenicity.” Analyses similar to this may be performed to confirm the immunogenicity of peptide conjugates containing multiple CTL epitopes and/or multiple HTL epitopes. In accordance with these procedures, it is found that a CTL response is induced, and concomitantly that an HTL response is induced upon administration of such compositions.

### Example 21

### Selection of CTL and HTL Epitopes for Inclusion in a PSCA-Specific Vaccine

[0777] This example illustrates a procedure for selecting peptide epitopes for vaccine compositions of the invention. The peptides in the composition can be in the form of a nucleic acid sequence, either single or one or more sequences (i.e., minigene) that encodes peptide(s), or can be single and/or polyepitopic peptides.

[0778] The following principles are utilized when selecting a plurality of epitopes for inclusion in a vaccine composition. Each of the following principles is balanced in order to make the selection.

[0779] Epitopes are selected which, upon administration, mimic immune responses that are correlated with PSCA clearance. The number of epitopes used depends on observations of patients who spontaneously clear PSCA. For example, if it has been observed that patients who spontaneously clear PSCA-expressing cells generate an immune response to at least three (3) epitopes from PSCA antigen, then at least three epitopes should be included for HLA class I. A similar rationale is used to determine HLA class II epitopes.

[0780] Epitopes are often selected that have a binding affinity of an IC₅₀ of 500 nM or less for an HLA class I molecule, or for class II, an IC₅₀ of 1000 nM or less; or HLA Class I peptides with high binding scores from the BIMAS web site, at URL bimas.dcrt.nih.gov/.

[0781] In order to achieve broad coverage of the vaccine through out a diverse population, sufficient supermotif bearing peptides, or a sufficient array of allele-specific motif bearing peptides, are selected to give broad population coverage. In one embodiment, epitopes are selected to provide at least 80% population coverage. A Monte Carlo analysis, a statistical evaluation known in the art, can be employed to assess breadth, or redundancy, of population coverage.

[0782] When creating polyepitopic compositions, or a minigene that encodes same, it is typically desirable to generate the smallest peptide possible that encompasses the epitopes of interest. The principles employed are similar, if not the same, as those employed when selecting a peptide comprising nested epitopes. For example, a protein sequence for the vaccine composition is selected because it has maximal number of epitopes contained within the sequence, i.e., it has a high concentration of epitopes. Epitopes may be nested or overlapping (i.e., frame shifted relative to one another). For example, with overlapping epitopes, two 9-mer epitopes and one 1 0-mer epitope can be present in a 10 amino acid peptide. Each epitope can be exposed and bound by an HLA molecule upon administration of such a peptide. A multi-epitopic, peptide can be generated synthetically, recombinantly, or via cleavage from the native source. Alternatively, an analog can be made of this native sequence, whereby one or more of the epitopes comprise substitutions that alter the cross-reactivity and/or binding affinity properties of the polyepitopic peptide. Such a vaccine composition is administered for therapeutic or prophylactic purposes. This embodiment provides for the possibility that an as yet undiscovered aspect of immune system processing will apply to the native nested sequence and thereby facilitate the production of therapeutic or prophylactic immune response-inducing vaccine compositions. Additionally such an embodiment provides for the possibility of motif-bearing epitopes for an HLA makeup that is presently unknown. Furthermore, this embodiment (absent the creating of any analogs) directs the immune response to multiple peptide sequences that are actually present in PSCA, thus avoiding the need to evaluate any junctional epitopes. Lastly, the embodiment provides an economy of scale when producing nucleic acid vaccine compositions. Related to this embodiment, computer programs can be derived in accordance with principles in the art, which identify in a target sequence, the greatest number of epitopes per sequence length.

[0783] A vaccine composition comprised of selected peptides, when administered, is safe, efficacious, and elicits an immune response similar in magnitude to an immune response that controls or clears cells that bear or overexpress PSCA.

### Example 22

### Construction of “Mini-gene” Multi-Epitope DNA Plasmids

[0784] This example discusses the construction of a minigene expression plasmid. Minigene plasmids may, of course, contain various configurations of B cell, CTL and/or HTL epitopes or epitope analogs as described herein.

[0785] A minigene expression plasmid typically includes multiple CTL and HTL peptide epitopes. In the present example, HLA-A2, -A3, -B7 supermotif-bearing peptide epitopes and HLA-A1 and -A24 motif-bearing peptide epitopes are used in conjunction with DR supermotif-bearing epitopes and/or DR3 epitopes. HLA class I supermotif or motif-bearing peptide epitopes derived PSCA, are selected such that multiple supermotifs/motifs are represented to ensure broad population coverage. Similarly, HLA class II epitopes are selected from PSCA to provide broad population coverage, i.e. both HLA DR-1-4-7 supermotif-bearing epitopes and HLA DR-3 motif-bearing epitopes are selected for inclusion in the minigene construct. The selected CTL and HTL epitopes are then incorporated into a minigene for expression in an expression vector.

[0786] Such a construct may additionally include sequences that direct the HTL epitopes to the endoplasmic reticulum. For example, the li protein may be fused to one or more HTL epitopes as described in the art, wherein the CLIP sequence of the li protein is removed and replaced with an HLA class II epitope sequence so that HLA class II epitope is directed to the endoplasmic reticulum, where the epitope binds to an HLA class II molecules.

[0787] This example illustrates the methods to be used for construction of a minigene-bearing expression plasmid. Other expression vectors that may be used for minigene compositions are available and known to those of skill in the art.

[0788] The minigene DNA plasmid of this example contains a consensus Kozak sequence and a consensus murine kappa Ig-light chain signal sequence followed by CTL and/or HTL epitopes selected in accordance with principles disclosed herein. The sequence encodes an open reading frame fused to the Myc and His antibody epitope tag coded for by the pcDNA 3.1 Myc-His vector.

[0789] Overlapping oligonucleotides that can, for example, average about 70 nucleotides in length with 15 nucleotide overlaps, are synthesized and HPLC-purified. The oligonucleotides encode the selected peptide epitopes as well as appropriate linker nucleotides, Kozak sequence, and signal sequence. The final multiepitope minigene is assembled by extending the overlapping oligonucleotides in three sets of reactions using PCR. A Perkin/Elmer 9600 PCR machine is used and a total of 30 cycles are performed using the following conditions: 95° C. for 15 sec, annealing temperature (5° below the lowest calculated Tm of each primer pair) for 30 sec, and 72° C. for 1 min.

[0790] For example, a minigene is prepared as follows. For a first PCR reaction, 5 μg of each of two oligonucleotides are annealed and extended: In an example using eight oligonucleotides, i.e., four pairs of primers, oligonucleotides 1+2, 3+4, 5+6, and 7+8 are combined in 100 μl reactions containing Pfu polymerase buffer (1×=10 mM KCL, 10 mM (NH4)₂SO₄, 20 mM Tris-chloride, pH 8.75, 2 mM MgSO₄, 0.1% Triton X-100, 100 μg/ml BSA), 0.25 mM each dNTP, and 2.5 U of Pfu polymerase. The full-length dimer products are gel-purified, and two reactions containing the product of 1+2 and 3+4, and the product of 5+6 and 7+8 are mixed, annealed, and extended for 10 cycles. Half of the two reactions are then mixed, and 5 cycles of annealing and extension carried out before flanking primers are added to amplify the full length product. The full-length product is gel-purified and cloned into pCR-blunt (Invitrogen) and individual clones are screened by sequencing.

### Example 23

### The Plasmid Construct and the Degree to Which it Induces Immunogenicity

[0791] The degree to which a plasmid construct, for example a plasmid constructed in accordance with the previous Example, is able to induce immunogenicity is confirmed in vitro by determining epitope presentation by APC following transduction or transfection of the APC with an epitope-expressing nucleic acid construct. Such a study determines “antigenicity” and allows the use of human APC. The assay determines the ability of the epitope to be presented by the APC in a context that is recognized by a T cell by quantifying the density of epitope-HLA class I complexes on the cell surface. Quantitation can be performed by directly measuring the amount of peptide eluted from the APC (see, e.g., Sijts et al., J. Immunol. 156:683-692, 1996; Demotz et al., Nature 342:682-684, 1989); or the number of peptide-HLA class I complexes can be estimated by measuring the amount of lysis or lymphokine release induced by diseased or transfected target cells, and then determining the concentration of peptide necessary to obtain equivalent levels of lysis or lymphokine release (see, e.g., Kageyama et al., J. Immunol. 154:567-576, 1995).

[0792] Alternatively, immunogenicity is confirmed through in vivo injections into mice and subsequent in vitro assessment of CTL and HTL activity, which are analyzed using cytotoxicity and proliferation assays, respectively, as detailed e.g., in Alexander et al., Immunity 1:751-761, 1994.

[0793] For example, to confirm the capacity of a DNA minigene construct containing at least one HLA-A2 supermotif peptide to induce CTLs in vivo, HLA-A2.1/K^{b} transgenic mice, for example, are immunized intramuscularly with 100 μg of naked cDNA. As a means of comparing the level of CTLs induced by cDNA immunization, a control group of animals is also immunized with an actual peptide composition that comprises multiple epitopes synthesized as a single polypeptide as they would be encoded by the minigene.

[0794] Splenocytes from immunized animals are stimulated twice with each of the respective compositions (peptide epitopes encoded in the minigene or the polyepitopic peptide), then assayed for peptide-specific cytotoxic activity in a ⁵¹Cr release assay. The results indicate the magnitude of the CTL response directed against the A2-restricted epitope, thus indicating the in vivo immunogenicity of the minigene vaccine and polyepitopic vaccine.

[0795] It is, therefore, found that the minigene elicits immune responses directed toward the HLA-A2 supermotif peptide epitopes as does the polyepitopic peptide vaccine. A similar analysis is also performed using other HLA-A3 and HLA-B7 transgenic mouse models to assess CTL induction by HLA-A3 and HLA-B7 motif or supermotif epitopes, whereby it is also found that the minigene elicits appropriate immune responses directed toward the provided epitopes.

[0796] To confirm the capacity of a class II epitope-encoding minigene to induce HTLs in vivo, DR transgenic mice, or for those epitopes that cross react with the appropriate mouse MHC molecule, I-A^{b}-restricted mice, for example, are immunized intramuscularly with 100 μg of plasmid DNA. As a means of comparing the level of HTLs induced by DNA immunization, a group of control animals is also immunized with an actual peptide composition emulsified in complete Freund's adjuvant. CD4+ T cells, i.e. HTLs, are purified from splenocytes of immunized animals and stimulated with each of the respective compositions (peptides encoded in the minigene). The HTL response is measured using a ³H-thymidine incorporation proliferation assay, (see, e.g., Alexander et al. Immunity 1:751-761, 1994). The results indicate the magnitude of the HTL response, thus demonstrating the in vivo immunogenicity of the minigene.

[0797] DNA minigenes, constructed as described in the previous Example, can also be confirmed as a vaccine in combination with a boosting agent using a prime boost protocol. The boosting agent can consist of recombinant protein (e.g., Barnett et al., Aids Res. and Human Retrovinuses 14, Supplement 3:S299-S309, 1998) or recombinant vaccinia, for example, expressing a minigene or DNA encoding the complete protein of interest (see, e.g., Hanke et al., Vaccine 16:439-445, 1998; Sedegah et al., Proc. Natl. Acad. Sci USA 95:7648-53, 1998; Hanke and McMichael, Immunol. Letters 66:177-181, 1999; and Robinson et al., Nature Med. 5:526-34, 1999).

[0798] For example, the efficacy of the DNA minigene used in a prime boost protocol is initially evaluated in transgenic mice. In this example, A2.1/K^{b} transgenic mice are immunized IM with 100 μg of a DNA minigene encoding the immunogenic peptides including at least one HLA-A2 supermotif-bearing peptide. After an incubation period (ranging from 3-9 weeks), the mice are boosted IP with 10⁷ pfu/mouse of a recombinant vaccinia virus expressing the same sequence encoded by the DNA minigene. Control mice are immunized with 100 μg of DNA or recombinant vaccinia without the minigene sequence, or with DNA encoding the minigene, but without the vaccinia boost. After an additional incubation period of two weeks, splenocytes from the mice are immediately assayed for peptide-specific activity in an ELISPOT assay. Additionally, splenocytes are stimulated in vitro with the A2-restricted peptide epitopes encoded in the minigene and recombinant vaccinia, then assayed for peptide-specific activity in an alpha, beta and/or gamma IFN ELISA.

[0799] It is found that the minigene utilized in a prime-boost protocol elicits greater immune responses toward the HLA-A2 supermotif peptides than with DNA alone. Such an analysis can also be performed using HLA-A11 or HLA-B7 transgenic mouse models to assess CTL induction by HLA-A3 or HLA-B7 motif or supermotif epitopes. The use of prime boost protocols in humans is described below in the Example entitled “Induction of CTL Responses Using a Prime Boost Protocol.”

### Example 24

### Peptide Compositions for Prophylactic Uses

[0800] Vaccine compositions of the present invention can be used to prevent PSCA expression in persons who are at risk for tumors that bear this antigen. For example, a polyepitopic peptide epitope composition (or a nucleic acid comprising the same) containing multiple CTL and HTL epitopes such as those selected in the above Examples, which are also selected to target greater than 80% of the population, is administered to individuals at risk for a PSCA-associated tumor.

[0801] For example, a peptide-based composition is provided as a single polypeptide that encompasses multiple epitopes. The vaccine is typically administered in a physiological solution that comprises an adjuvant, such as Incomplete Freunds Adjuvant. The dose of peptide for the initial immunization is from about 1 to about 50,000 μg, generally 100-5,000 μg, for a 70 kg patient. The initial administration of vaccine is followed by booster dosages at 4 weeks followed by evaluation of the magnitude of the immune response in the patient, by techniques that determine the presence of epitope-specific CTL populations in a PBMC sample. Additional booster doses are administered as required. The composition is found to be both safe and efficacious as a prophylaxis against PSCA-associated disease.

[0802] Alternatively, a composition typically comprising transfecting agents is used for the administration of a nucleic acid-based vaccine in accordance with methodologies known in the art and disclosed herein.

### Example 25

### Polyepitopic Vaccine Compositions Derived from Native PSCA Sequences

[0803] A native PSCA polyprotein sequence is analyzed, preferably using computer algorithms defined for each class I and/or class II supermotif or motif, to identify “relatively short” regions of the polyprotein that comprise multiple epitopes. The “relatively short” regions are preferably less in length than an entire native antigen. This relatively short sequence that contains multiple distinct or overlapping, “nested” epitopes can be used to generate a minigene construct. The construct is engineered to express the peptide, which corresponds to the native protein sequence. The “relatively short” peptide is generally less than 250 amino acids in length, often less than 100 amino acids in length, preferably less than 75 amino acids in length, and more preferably less than 50 amino acids in length. The protein sequence of the vaccine composition is selected because it has maximal number of epitopes contained within the sequence, i.e., it has a high concentration of epitopes. As noted herein, epitope motifs may be nested or overlapping (i.e., frame shifted relative to one another). For example, with overlapping epitopes, two 9-mer epitopes and one 10-mer epitope can be present in a 10 amino acid peptide. Such a vaccine composition is administered for therapeutic or prophylactic purposes.

[0804] The vaccine composition will include, for example, multiple CTL epitopes from PSCA antigen and at least one HTL epitope. This polyepitopic native sequence is administered either as a peptide or as a nucleic acid sequence which encodes the peptide. Alternatively, an analog can be made of this native sequence, whereby one or more of the epitopes comprise substitutions that alter the cross-reactvity and/or binding affinity properties of the polyepitopic peptide.

[0805] The embodiment of this example provides for the possibility that an as yet undiscovered aspect of immune system processing will apply to the native nested sequence and thereby facilitate the production of therapeutic or prophylactic immune response-inducing vaccine compositions. Additionally, such an embodiment provides for the possibility of motif-bearing epitopes for an HLA makeup(s) that is presently unknown. Furthermore, this embodiment (excluding an analoged embodiment) directs the immune response to multiple peptide sequences that are actually present in native PSCA, thus avoiding the need to evaluate any junctional epitopes. Lastly, the embodiment provides an economy of scale when producing peptide or nucleic acid vaccine compositions.

[0806] Related to this embodiment, computer programs are available in the art which can be used to identify in a target sequence, the greatest number of epitopes per sequence length.

### Example 26

### Polyepitopic Vaccine Compositions from Multiple Antigens

[0807] The PSCA peptide epitopes of the present invention are used in conjunction with epitopes from other target tumor-associated antigens, to create a vaccine composition that is useful for the prevention or treatment of cancer that expresses PSCA and such other antigens. For example, a vaccine composition can be provided as a single polypeptide that incorporates multiple epitopes from PSCA as well as tumor-associated antigens that are often expressed with a target cancer associated with PSCA expression, or can be administered as a composition comprising a cocktail of one or more discrete epitopes. Alternatively, the vaccine can be administered as a minigene construct or as dendritic cells which have been loaded with the peptide epitopes in vitro.

### Example 27

### Use of Peptides to Evaluate an Immune Response

[0808] Peptides of the invention may be used to analyze an immune response for the presence of specific antibodies, CTL or HTL directed to PSCA. Such an analysis can be performed in a manner described by Ogg et al., Science 279:2103-2106, 1998. In this Example, peptides in accordance with the invention are used as a reagent for diagnostic or prognostic purposes, not as an immunogen.

[0809] In this example highly sensitive human leukocyte antigen tetrameric complexes (“tetramers”) are used for a cross-sectional analysis of, for example, PSCA HLA-A*0201-specific CTL frequencies from HLA A*0201-positive individuals at different stages of disease or following immunization comprising a PSCA peptide containing an A*0201 motif. Tetrameric complexes are synthesized as described (Musey et al., N. Engl. J. Med. 337:1267, 1997). Briefly, purified HLA heavy chain (A*0201 in this example) and β2-microglobulin are synthesized by means of a prokaryotic expression system. The heavy chain is modified by deletion of the transmembrane-cytosolic tail and COOH-terminal addition of a sequence containing a BirA enzymatic biotinylation site. The heavy chain, p2-microglobulin, and peptide are refolded by dilution. The 45-kD refolded product is isolated by fast protein liquid chromatography and then biotinylated by BirA in the presence of biotin (Sigma, St. Louis, Mo.), adenosine 5′ triphosphate and magnesium. Streptavidin-phycoerythrin conjugate is added in a 1:4 molar ratio, and the tetrameric product is concentrated to 1 mg/ml. The resulting product is referred to as tetramer-phycoerythrin.

[0810] For the analysis of patient blood samples, approximately one million PBMCs are centrifuged at 300 g for 5 minutes and resuspended in 50 μl of cold phosphate-buffered saline. Tri-color analysis is performed with the tetramer-phycoerythrin, along with anti-CD8-Tricolor, and anti-CD38. The PBMCs are incubated with tetramer and antibodies on ice for 30 to 60 min and then washed twice before formaldehyde fixation. Gates are applied to contain >99.98% of control samples. Controls for the tetramers include both A*0201-negative individuals and A*0201-positive non-diseased donors. The percentage of cells stained with the tetramer is then determined by flow cytometry. The results indicate the number of cells in the PBMC sample that contain epitope-restricted CTLs, thereby readily indicating the extent of immune response to the PSCA epitope, and thus the status of exposure to PSCA, or exposure to a vaccine that elicits a protective or therapeutic response.

### Example 28

### Use of Peptide Epitopes to Evaluate Recall Responses

[0811] The peptide epitopes of the invention are used as reagents to evaluate T cell responses, such as acute or recall responses, in patients. Such an analysis may be performed on patients who have recovered from PSCA-associated disease or who have been vaccinated with a PSCA vaccine.

[0812] For example, the class I restricted CTL response of persons who have been vaccinated may be analyzed. The vaccine may be any PSCA vaccine. PBMC are collected from vaccinated individuals and HLA typed. Appropriate peptide epitopes of the invention that, optimally, bear supermotifs to provide cross-reactivity with multiple HLA supertype family members, are then used for analysis of samples derived from individuals who bear that HLA type.

[0813] PBMC from vaccinated individuals are separated on Ficoll-Histopaque density gradients (Sigma Chemical Co., St. Louis, Mo.), washed three times in HBSS (GIBCO Laboratories), resuspended in RPMI-1640 (GIBCO Laboratories) supplemented with L-glutamine (2 mM), penicillin (50 U/ml), streptomycin (50 μg/ml), and Hepes (10 mM) containing 10% heat-inactivated human AB serum (complete RPMI) and plated using microculture formats. A synthetic peptide comprising an epitope of the invention is added at 10 μg/ml to each well and HBV core 128-140 epitope is added at 1 μg/ml to each well as a source of T cell help during the first week of stimulation.

[0814] In the microculture format, 4×10⁵ PBMC are stimulated with peptide in 8 replicate cultures in 96-well round bottom plate in 100 μl/well of complete RPMI. On days 3 and 10, 100 μl of complete RPMI and 20 U/ml final concentration of rIL-2 are added to each well. On day 7 the cultures are transferred into a 96-well flat-bottom plate and restimulated with peptide, rIL-2 and 10⁵ irradiated (3,000 rad) autologous feeder cells. The cultures are tested for cytotoxic activity on day 14. A positive CTL response requires two or more of the eight replicate cultures to display greater than 10% specific ⁵¹Cr release, based on comparison with non-diseased control subjects as previously described (Rehermann, et al., Nature Med. 2:1104,1108, 1996; Rehermann et al., J. Clin. Invest. 97:1655-1665, 1996; and Rehermann et al. J. Clin. Invest. 98:1432-1440, 1996).

[0815] Target cell lines are autologous and allogeneic EBV-transformed B-LCL that are either purchased from the American Society for Histocompatibility and Immunogenetics (ASHI, Boston, Mass.) or established from the pool of patients as described (Guilhot, et al. J. Virol. 66:2670-2678, 1992).

[0816] Cytotoxicity assays are performed in the following manner. Target cells consist of either allogeneic HLA-matched or autologous EBV-transformed B lymphoblastoid cell line that are incubated overnight with the synthetic peptide epitope of the invention at 10 μM, and labeled with 100 μCi of ⁵¹Cr (Amersham Corp., Arlington Heights, Ill.) for 1 hour after which they are washed four times with HBSS.

[0817] Cytolytic activity is determined in a standard 4-h, split well ⁵¹Cr release assay using U-bottomed 96 well plates containing 3,000 targets/well. Stimulated PBMC are tested at effector/target (E/T) ratios of 20-50:1 on day 14. Percent cytotoxicity is determined from the formula: 100×[(experimental release-spontaneous release)/maximum release−spontaneous release)]. Maximum release is determined by lysis of targets by detergent (2% Triton X-100; Sigma Chemical Co., St. Louis, Mo.). Spontaneous release is <25% of maximum release for all experiments.

[0818] The results of such an analysis indicate the extent to which HLA-restricted CTL populations have been stimulated by previous exposure to PSCA or a PSCA vaccine.

[0819] Similarly, Class II restricted HTL responses may also be analyzed. Purified PBMC are cultured in a 96-well flat bottom plate at a density of 1.5×10⁵ cells/well and are stimulated with 10 μg/ml synthetic peptide of the invention, whole PSCA antigen, or PHA. Cells are routinely plated in replicates of 4-6 wells for each condition. After seven days of culture, the medium is removed and replaced with fresh medium containing 10 U/ml IL-2. Two days later, 1 μCi ³H-thymidine is added to each well and incubation is continued for an additional 18 hours. Cellular DNA is then harvested on glass fiber mats and analyzed for ³H-thymidine incorporation. Antigen-specific T cell proliferation is calculated as the ratio of ³H-thymidine incorporation in the presence of antigen divided by the ³H-thymidine incorporation in the absence of antigen.

### Example 29

### Induction of Specific CTL Response in Humans

[0820] A human clinical trial for an immunogenic composition comprising CTL and HTL epitopes of the invention is set up as an IND Phase I, dose escalation study and carried out as a randomized, double-blind, placebo-controlled trial. Such a trial is designed, for example, as follows:

[0821] A total of about 27 individuals are enrolled and divided into 3 groups:

[0822] Group I: 3 subjects are injected with placebo and 6 subjects are injected with 5 μg of peptide composition;

[0823] Group II: 3 subjects are injected with placebo and 6 subjects are injected with 50 μg peptide composition;

[0824] Group III: 3 subjects are injected with placebo and 6 subjects are injected with 500 μg of peptide composition.

[0825] After 4 weeks following the first injection, all subjects receive a booster inoculation at the same dosage.

[0826] The endpoints measured in this study relate to the safety and tolerability of the peptide composition as well as its immunogenicity. Cellular immune responses to the peptide composition are an index of the intrinsic activity of this the peptide composition, and can therefore be viewed as a measure of biological efficacy. The following summarize the clinical and laboratory data that relate to safety and efficacy endpoints.

[0827] Safety: The incidence of adverse events is monitored in the placebo and drug treatment group and assessed in terms of degree and reversibility.

[0828] Evaluation of Vaccine Efficacy: For evaluation of vaccine efficacy, subjects are bled before and after injection. Peripheral blood mononuclear cells are isolated from fresh heparinized blood by Ficoll-Hypaque density gradient centrifugation, aliquoted in freezing media and stored frozen. Samples are assayed for CTL and HTL activity.

[0829] The vaccine is found to be both safe and efficacious.

### Example 30

### Phase II Trials in Patients Expressing PSCA

[0830] Phase II trials are performed to study the effect of administering the CTL-HTL peptide compositions to patents having cancer that expresses PSCA. The main objectives of the trial are to determine an effective dose and regimen for inducing CTLs in cancer patients that express PSCA, to establish the safety of inducing a CTL and HTL response in these patients, and to see to what extent activation of CTLs improves the clinical picture of these patients, as manifested, e.g., by the reduction and/or shrinking of lesions. Such a study is designed, for example, as follows:

[0831] The studies are performed in multiple centers. The trial design is an open-label, uncontrolled, dose escalation protocol wherein the peptide composition is administered as a single dose followed six weeks later by a single booster shot of the same dose. The dosages are 50, 500 and 5,000 micrograms per injection. Drug-associated adverse effects (severity and reversibility) are recorded.

[0832] There are three patient groupings. The first group is injected with 50 micrograms of the peptide composition and the second and third groups with 500 and 5,000 micrograms of peptide composition, respectively. The patients within each group range in age from 21-65 and represent diverse ethnic backgrounds. All of them have a tumor that expresses PSCA.

[0833] Clinical manifestations or antigen-specific T-cell responses are monitored to assess the effects of administering the peptide compositions. The vaccine composition is found to be both safe and efficacious in the treatment of PSCA-associated disease.

### Example 31

### Induction of CTL Responses Using a Prime Boost Protocol

[0834] A prime boost protocol similar in its underlying principle to that used to confirm the efficacy of a DNA vaccine in transgenic mice, such as described above in the Example entitled “The Plasmid Construct and the Degree to Which It Induces Immunogenicity,” can also be used for the administration of the vaccine to humans. Such a vaccine regimen can include an initial administration of, for example, naked DNA followed by a boost using recombinant virus encoding the vaccine, or recombinant protein/polypeptide or a peptide mixture administered in an adjuvant.

[0835] For example, the initial immunization may be performed using an expression vector, such as that constructed in the Example entitled “Construction of “Minigene” Multi-Epitope DNA Plasmids” in the form of naked nucleic acid administered IM (or SC or ID) in the amounts of 0.5-5 mg at multiple sites. The nucleic acid (0.1 to 1000 μg) can also be administered a gene gun. Following an incubation period of 3-4 weeks, a booster dose is then administered. The booster can be recombinant fowlpox virus administered at a dose of 5-10⁷ to 5×10⁹ pfu. An alternative recombinant virus, such as an MVA, canarypox, adenovirus, or adeno-associated virus, can also be used for the booster, or the polyepitopic protein or a mixture of the peptides can be administered. For evaluation of vaccine efficacy, patient blood samples are obtained before immunization as well as at intervals following administration of the initial vaccine and booster doses of the vaccine. Peripheral blood mononuclear cells are isolated from fresh heparinized blood by Ficoll-Hypaque density gradient centrifugation, aliquoted in freezing media and stored frozen. Samples are assayed for CTL and HTL activity.

[0836] Analysis of the results indicates that a magnitude of response sufficient to achieve a therapeutic or protective immunity against PSCA is generated.

### Example 32

### Administration of Vaccine Compositions Using Dendritic Cells (DC)

[0837] Vaccines comprising peptide epitopes of the invention can be administered using APCs, or “professional” APCs such as DC. In this example, peptide-pulsed DC are administered to a patient to stimulate a CTL response in vivo. In this method, dendritic cells are isolated, expanded, and pulsed with a vaccine comprising peptide CTL and HTL epitopes of the invention. The dendritic cells are infused back into the patient to elicit CTL and HTL responses in vivo. The induced CTL and HTL then destroy or facilitate destruction, respectively, of the target cells that bear the PSCA protein from which the epitopes in the vaccine are derived.

[0838] For example, a cocktail of epitope-comprising peptides is administered ex vivo to PBMC, or isolated DC therefrom. A pharmaceutical to facilitate harvesting of DC can be used, such as Progenipoietin™ (Monsanto, St. Louis, Mo.) or GM-CSF/IL-4. After pulsing the DC with peptides, and prior to reinfusion into patients, the DC are washed to remove unbound peptides.

[0839] As appreciated clinically, and readily determined by one of skill based on clinical outcomes, the number of DC reinfused into the patient can vary (see, e.g., Nature Med. 4:328, 1998; Nature Med. 2:52, 1996 and Prostate 32:272, 1997). Although 2-50×10⁶ DC per patient are typically administered, larger number of DC, such as 10⁷ or 10⁸ can also be provided. Such cell populations typically contain between 50-90% DC.

[0840] In some embodiments, peptide-loaded PBMC are injected into patients without purification of the DC. For example, PBMC generated after treatment with an agent such as Progenipoietin™ are injected into patients without purification of the DC. The total number of PBMC that are administered often ranges from 10⁸ to 10¹⁰. Generally, the cell doses injected into patients is based on the percentage of DC in the blood of each patient, as determined, for example, by immunofluorescence analysis with specific anti-DC antibodies. Thus, for example, if Progenipoietin™ mobilizes 2% DC in the peripheral blood of a given patient, and that patient is to receive 5×10⁶ DC, then the patient will be injected with a total of 2.5×10⁸ peptide-loaded PBMC. The percent DC mobilized by an agent such as Progenipoietin™ is typically estimated to be between 2-10%, but can vary as appreciated by one of skill in the art.

[0841] Ex vivo Activation of CTL/HTL Responses

[0842] Alternatively, ex vivo CTL or HTL responses to PSCA antigens can be induced by incubating, in tissue culture, the patient's, or genetically compatible, CTL or HTL precursor cells together with a source of APC, such as DC, and immunogenic peptides. After an appropriate incubation time (typically about 7-28 days), in which the precursor cells are activated and expanded into effector cells, the cells are infused into the patient, where they will destroy (CTL) or facilitate destruction (HTL) of their specific target cells, i.e., tumor cells.

### Example 33

### An Alternative Method of Identifying and Confirming Motif-Bearing Peptides

[0843] Another method of identifying and confirming motif-bearing peptides is to elute them from cells bearing defined MHC molecules. For example, EBV transformed B cell lines used for tissue typing have been extensively characterized to determine which HLA molecules they express. In certain cases these cells express only a single type of HLA molecule. These cells can be transfected with nucleic acids that express the antigen of interest, e.g. PSCA. Peptides produced by endogenous antigen processing of peptides produced as a result of transfecton will then bind to HLA molecules within the cell and be transported and displayed on the cell's surface. Peptides are then eluted from the HLA molecules by exposure to mild acid conditions and their amino acid sequence determined, e.g., by mass spectral analysis (e.g., Kubo et al, J. Immunol. 152:3913, 1994). Because the majority of peptides that bind a particular HLA molecule are motif-bearing, this is an alternative modality for obtaining the motif-bearing peptides correlated with the particular HLA molecule expressed on the cell.

[0844] Alternatively, cell lines that do not express endogenous HLA molecules can be transfected with an expression construct encoding a single HLA allele. These cells can then be used as described, i.e., they can then be transfected with nucleic acids that encode PSCA to isolate peptides corresponding to PSCA that have been presented on the cell surface. Peptides obtained from such an analysis will bear motif(s) that correspond to binding to the single HLA allele that is expressed in the cell.

[0845] As appreciated by one in the art, one can perform a similar analysis on a cell bearing more than one HLA allele and subsequently determine peptides specific for each HLA allele expressed. Moreover, one of skill would also recognize that means other than transfection, such as loading with a protein antigen, can be used to provide a source of antigen to the cell.

### Example 34

### Complementary Polynucleotides

[0846] Sequences complementary to the PSCA-encoding sequences, or any parts thereof, are used to detect, decrease, or inhibit expression of naturally occurring PSCA. Although use of oligonucleotides comprising from about 15 to 30 base pairs is described, essentially the same procedure is used with smaller or with larger sequence fragments. Appropriate oligonucleotides are designed using, e.g., OLIGO 4.06 software (National Biosciences) and the coding sequence of PSCA. To inhibit transcription, a complementary oligonucleotide is designed from the most unique 5′ sequence and used to prevent promoter binding to the coding sequence. To inhibit translation, a complementary oligonucleotide is designed to prevent ribosomal binding to a PSCA-encoding transcript.

### Example 35

### Purification of Naturally-Occurring or Recombinant PSCA Using PSCA-Specific Antibodies

[0847] Naturally occurring or recombinant PSCA is substantially purified by immunoaffinity chromatography using antibodies specific for PSCA. An immunoaffinity column is constructed by covalently coupling anti-PSCA antibody to an activated chromatographic resin, such as CNBr-activated SEPHAROSE (Amersham Pharmacia Biotech). After the coupling, the resin is blocked and washed according to the manufacturer's instructions.

[0848] Media containing PSCA are passed over the immunoaffinity column, and the column is washed under conditions that allow the preferential absorbance of PSCA (e.g., high ionic strength buffers in the presence of detergent). The column is eluted under conditions that disrupt antibody/PSCA binding (e.g., a buffer of pH 2 to pH 3, or a high concentration of a chaotrope, such as urea or thiocyanate ion), and GCR.P is collected.

### Example 36

### Identification of Molecules Which Interact with PSCA

[0849] PSCA, or biologically active fragments thereof, are labeled with 121 1 Bolton-Hunter reagent. (See, e.g., Bolton et al. (1973) Biochem. J. 133:529.) Candidate molecules previously arrayed in the wells of a multi-well plate are incubated with the labeled PSCA, washed, and any wells with labeled PSCA complex are assayed. Data obtained using different concentrations of PSCA are used to calculate values for the number, affinity, and association of PSCA with the candidate molecules.

### Example 37

### In Vivo Assay for PSCA v.4 Tumor Growth Promotion

[0850] The effect of the PSCA v.4 protein on tumor cell growth is evaluated in vivo by evaluating tumor development and growth of cells expressing or lacking PSCA v.4. For example, SCID mice are injected subcutaneously on each flank with 1×10⁶ of either 3T3, prostate (e.g. PC3 cells), bladder (e.g. UM-UC3 cells) or pancreas (e.g. PANC1 cells) cancer cell lines containing tkNeo empty vector or PSCA v.4. At least two strategies may be used: (1) Constitutive PSCA v.4 expression under regulation of a promoter such as a constitutive promoter obtained from the genomes of viruses such as polyoma virus, fowlpox virus (UK 2,211,504 published 5 Jul. 1989), adenovirus (such as Adenovirus 2), bovine papilloma virus, avian sarcoma virus, cytomegalovirus, a retrovirus, hepatitis-B virus and Simian Virus 40 (SV40), or from heterologous mammalian promoters, e.g., the actin promoter or an immunoglobulin promoter, provided such promoters are compatible with the host cell systems, and (2) Regulated expression under control of an inducible vector system, such as ecdysone, tetracycline, etc., provided such promoters are compatible with the host cell systems. Tumor volume is then monitored by caliper measurement at the appearance of palpable tumors and followed over time to determine if PSCA v.4-expressing cells grow at a faster rate and whether tumors produced by PSCA v.4-expressing cells demonstrate characteristics of altered aggressiveness (e.g. enhanced metastasis, vasculanzation, reduced responsiveness to chemotherapeutic drugs).

[0851] Additionally, mice can be implanted with 1×10⁵ of the same cells orthotopically to determine if PSCA v.4 has an effect on local growth in the pancreas, and whether PSCA v.4 affects the ability of the cells to metastasize, specifically to lymph nodes, and bone (Miki T et al, Oncol Res. 2001;12:209; Fu X et al, Int. J Cancer. 1991, 49:938). The effect of PSCA v.4 on bone tumor formation and growth may be assessed by injecting tumor cells intratibially.

[0852] The assay is also useful to determine the PSCA v.4 inhibitory effect of candidate therapeutic compositions, such as for example, PSCA v.4 intrabodies, PSCA v.4 antisense molecules and ribozymes.

### Example 38

### PSCA v.4 Monoclonal Antibody-Mediated Inhibition of Tumors In Vivo

[0853] The significant expression of PSCA v.4 in cancer tissues, together with its restrictive expression in normal tissues makes PSCA v.4 a good target for antibody therapy. Similarly, PSCA v.4 is a target for T cell-based immunotherapy. Thus, the therapeutic efficacy of anti-PSCA v.4 mAbs in human cancer xenograft mouse models, including prostate, bladder, and pancreas (e.g. PANC1 cells) and other -PSCA v.4 cancers listed in table 1, is evaluated by using recombinant cell lines such as PC3-PSCA v.4, UM-UC3-PSCA v.4, PANC1-PSCA v.4, and 3T3-PSCA v.4 (see, e.g., Kaighn, M. E., et al., Invest Urol, 1979. 17(1): 16-23), as well as human xenograft models (Saffran et al PNAS 1999, 10:1073-1078).

[0854] Antibody efficacy on tumor growth and metastasis formation is studied, e.g., in a mouse orthotopic ovary, pancreas, or blood cancer xenograft models. The antibodies can be unconjugated, as discussed in this Example, or can be conjugated to a therapeutic modality, as appreciated in the art. Anti-PSCA v.4 mAbs inhibit formation of tumors in mouse xenografts. Anti-PSCA v.4 mAbs also retard the growth of established orthotopic tumors and prolonged survival of tumor-bearing mice. These results indicate the utility of anti-PSCA v.4 mAbs in the treatment of local and advanced stages several solid tumors. (See, e.g., Saffran, D., et al., PNAS 10:1073-1078 or world wide web URL pnas.org/cgi/doi/10.1073/pnas.051624698).

[0855] Administration of the anti-PSCA v.4 mAbs led to retardation of established orthotopic tumor growth and inhibition of metastasis to distant sites, resulting in a significant prolongation in the survival of tumor-bearing mice. These studies indicate that PSCA v.4 as an attractive target for immunotherapy and demonstrate the therapeutic potential of ant-PSCA v.4 mAbs for the treatment of local and metastatic cancer. This example indicates that unconjugated PSCA v.4 monoclonal antibodies are effective to inhibit the growth of human pancreatic, ovarian, and lymphomas tumor xenografts grown in SCID mice; accordingly a combination of such efficacious monoclonal antibodies is also effective.

[0856] Tumor Inhibition Using Multiple Unconjugated PSCA v.4 mAbs

[0857] Materials and Methods

[0858] PSCA v.4 Monoclonal Antibodies:

[0859] Monoclonal antibodies are raised against PSCA v.4 as described in the Example entitled “Generation of PSCA v.4 Monoclonal Antibodies (mAbs).” The antibodies are characterized by ELISA, Western blot, FACS, and immunoprecipitation for their capacity to bind PSCA v.4. Epitope mapping data for the anti-PSCA v.4 mAbs, as determined by ELISA and Western analysis, recognize epitopes on the PSCA v.4 protein. Immunohistochemical analysis of cancer tissues and cells with these antibodies is performed.

[0860] The monoclonal antibodies are purified from ascites or hybridoma tissue culture supernatants by Protein-G Sepharose chromatography, dialyzed against PBS, filter sterilized, and stored at −20° C. Protein determinations are performed by a Bradford assay (Bio-Rad, Hercules, Calif.). A therapeutic monoclonal antibody or a cocktail comprising a mixture of individual monoclonal antibodies is prepared and used for the treatment of mice receiving subcutaneous or orthotopic injections of PC3, UM-UC3, CaKi, and A427 tumor xenografts.

[0861] Cell Lines and Xenografts

[0862] The LAPC-9 xenograft, which expresses a wild-type androgen receptor and produces prostate-specific antigen (PSA), is passaged in 6- to 8-week-old male ICR-severe combined immunodeficient (SCID) mice (Taconic Farms) by s.c. trocar implant (Craft, N., et al., 1999, Cancer Res. 59:5030-5036). The AGS-K3 and AGS-K6 kidney xenografts are also passaged by subcutaneous implants in 6- to 8-week old SCID mice. Single-cell suspensions of tumor cells are prepared as described in Craft, et al.

[0863] The cancer cell lines PC3, UM-UC3 and PANC1 cell lines, as well as the fibroblast line NIH 3T3 (American Type Culture Collection). The prostate carcinoma cell line PC3 is maintained in RPMI supplemented with L-glutamine and 10% FBS, and the bladder and pancreas carcinoma lines, UM-UC3 and PANC1 respectively, are maintained in DMEM supplemented with L-glutamine and 10% FBS. PC3-PSCA v.4, UM-UC3-PSCA v.4, PANC1-PSCA v.4 and 3T3-PSCA v.4 cell populations are generated by retroviral gene transfer as described in Hubert, R. S., et al., Proc Natl. Acad. Sci USA, 1999. 96(25): 14523.

[0864] Xenograft Mouse Models.

[0865] Subcutaneous (s.c.) tumors are generated by injection of 2×10⁶ cancer cells mixed at a 1:1 dilution with Matrigel (Collaborative Research) in the right flank of male SCID mice. To test antibody efficacy on tumor formation, i.e. antibody injections are started on the same day as tumor-cell injections. As a control, mice are injected with either purified mouse IgG (ICN) or PBS; or a purified monoclonal antibody that recognizes an irrelevant antigen not expressed in human cells. In preliminary studies, no difference is found between mouse IgG or PBS on tumor growth. Tumor sizes are determined by caliper measurements, and the tumor volume is calculated as length x width x height. Mice with Subcutaneous tumors greater than 1.5 cm in diameter are sacrificed.

[0866] Orthotopic injections are performed under anesthesia by using ketamine/xylazine. For prostate orthotopic studies, an incision is made through the abdominal muscles to expose the bladder and seminal vesicles, which then are delivered through the incision to expose the dorsal prostate. LAPC-9 cells (5×105) mixed with Matrigel are injected into each dorsal lobe in a 10 μl volume. To monitor tumor growth, mice are bled on a weekly basis for determination of PSA levels. For pancreas orthotoptic model, an incision is made through the abdominal muscles to expose the mammary tissues and a single cell suspension of pancreas cancer cells is injected into the mammary pad. For the bladder orthotopic model, AGS-B1 bladder cancer tissue is adhered onto the bladder wall. Following tumor implantation, the mice are segregated into groups for the appropriate treatments, with anti-PSCA v.4 or control mAbs being injected i.p. To monitor tumor growth, mice are palpated and blood is collected on a weekly basis to measure hCG levels.

[0867] Anti-PSCA v.4 mAbs Inhibit Growth of PSCA v.4-Expressing Xenograft-Cancer Tumors

[0868] The effect of anti-PSCA v.4 mAbs on tumor formation is tested by using cell line (e.g. PC3, UM-UC3, PANC1 and 3T3) and patient-derived tumor orthotopic models. As compared with the s.c. tumor model, the orthotopic model, which requires injection of tumor cells directly in the mouse organ results in a local tumor growth, development of metastasis in distal sites, deterioration of mouse health, and subsequent death (Saffran, D., et al., PNAS supra). The features make the orthotopic model more representative of human disease progression and allowed us to follow the therapeutic effect of mAbs on clinically relevant end points.

[0869] A major advantage of the orthotopic cancer models is the ability to study the development of metastases. Formation of metastasis in mice bearing established orthotopic tumors is studies by IHC analysis on lung sections using an antibody against a tumor-specific cell-surface protein such as anti-CK20 for prostate cancer (Lin S et al, Cancer Detect Prev. 2001;25:202).

[0870] Another advantage of xenograft cancer models is the ability to study neovascularization and angiogenesis. Tumor growth is partly dependent on new blood vessel development. Although the capillary system and developing blood network is of host origin, the initiation and architecture of the neovasculature is regulated by the xenograft tumor (Davidoff A M et al, Clin Cancer Res. 2001;7:2870; Solesvik O et al, Eur. J Cancer Clin Oncol. 1984, 20:1295). The effect of antibody and small molecule on neovascularization is studied in accordance with procedures known in the art, such as by IHC analysis of tumor tissues and their surrounding microenvironment.

[0871] Mice bearing established orthotopic tumors are administered 1000 μg injections of either anti-PSCA v.4 mAb or PBS over a 4-week period. Mice in both groups are allowed to establish a high tumor burden, to ensure a high frequency of metastasis formation in mouse lungs. Mice then are killed and their bladders, livers, bone and lungs are analyzed for the presence of tumor cells by IHC analysis. These studies demonstrate a broad anti-tumor efficacy of anti-PSCA v.4 antibodies on initiation and progression of prostate cancer in xenograft mouse models. Anti-PSCA v.4 antibodies inhibit tumor formation of tumors as well as retarding the growth of already established tumors and prolong the survival of treated mice. Moreover, anti-PSCA v.4 mAbs demonstrate a dramatic inhibitory effect on the spread of local prostate tumor to distal sites, even in the presence of a large tumor burden. Thus, anti-PSCA v.4 mAbs are efficacious on major clinically relevant end points (tumor growth), prolongation of survival, and health.

### Example 39

### Therapeutic and Diagnostic Use of Anti-PSCA Antibodies in Humans

[0872] Anti-PSCA monoclonal antibodies are safely and effectively used for diagnostic, prophylactic, prognostic and/or therapeutic purposes in humans. Western blot and immunohistochemical analysis of cancer tissues and cancer xenografts with anti-PSCA mAb show strong extensive staining in carcinoma but significantly lower or undetectable levels in normal tissues. Detection of PSCA in carcinoma and in metastatic disease demonstrates the usefulness of the mAb as a diagnostic and/or prognostic indicator. Anti-PSCA antibodies are therefore used in diagnostic applications such as immunohistochemistry of kidney biopsy specimens to detect cancer from suspect patients.

[0873] As determined by flow cytometry, anti-PSCA mAb specifically binds to carcinoma cells. Thus, anti-PSCA antibodies are used in diagnostic whole body imaging applications, such as radioimmunoscintigraphy and radioimmunotherapy, (see, e.g., Potamianos S., et. al. Anticancer Res 20(2A):925-948 (2000)) for the detection of localized and metastatic cancers that exhibit expression of PSCA. Shedding or release of an extracellular domain of PSCA into the extracellular milieu, such as that seen for alkaline phosphodiesterase B10 (Meerson, N. R., Hepatology 27:563-568 (1998)), allows diagnostic detection of PSCA by anti-PSCA antibodies in serum and/or urine samples from suspect patients.

[0874] Anti-PSCA antibodies that specifically bind PSCA are used in therapeutic applications for the treatment of cancers that express PSCA. Anti-PSCA antibodies are used as an unconjugated modality and as conjugated form in which the antibodies are attached to one of various therapeutic or imaging modalities well known in the art, such as a prodrugs, enzymes or radioisotopes. In preclinical studies, unconjugated and conjugated anti-PSCA antibodies are tested for efficacy of tumor prevention and growth inhibition in the SCID mouse cancer xenograft models, e.g., kidney cancer models AGS-K3 and AGS-K6, (see, e.g., the Example entitled “PSCA Monoclonal Antibody-mediated Inhibition of Bladder and Lung Tumors In Vivo”). Either conjugated and unconjugated anti-PSCA antibodies are used as a therapeutic modality in human clinical trials either alone or in combination with other treatments as described in following Examples.

### Example 40

### Human Clinical Trials for the Treatment and Diagnosis of Human Carcinomas Through Use of Human Anti-PSCA Antibodies In vivo

[0875] Antibodies are used in accordance with the present invention which recognize an epitope on PSCA, and are used in the treatment of certain tumors such as those listed in Table I. Based upon a number of factors, including PSCA expression levels, tumors such as those listed in Table I are presently preferred indications. In connection with each of these indications, three clinical approaches are successfully pursued.

[0876] I.) Adjunctive therapy: In adjunctive therapy, patients are treated with anti-PSCA antibodies in combination with a chemotherapeutic or antineoplastic agent and/or radiation therapy. Primary cancer targets, such as those listed in Table I, are treated under standard protocols by the addition anti-PSCA antibodies to standard first and second line therapy. Protocol designs address effectiveness as assessed by reduction in tumor mass as well as the ability to reduce usual doses of standard chemotherapy. These dosage reductions allow additional and/or prolonged therapy by reducing dose-related toxicity of the chemotherapeutic agent. Anti-PSCA antibodies are utilized in several adjunctive clinical trials in combination with the chemotherapeutic or antineoplastic agents adriamycin (advanced prostrate carcinoma), cisplatin (advanced head and neck and lung carcinomas), taxol (breast cancer), and doxorubicin (preclinical).

[0877] II.) Monotherapy: In connection with the use of the anti-PSCA antibodies in monotherapy of tumors, the antibodies are administered to patients without a chemotherapeutic or antineoplastic agent. In one embodiment, monotherapy is conducted clinically in end stage cancer patients with extensive metastatic disease. Patients show some disease stabilization. Trials demonstrate an effect in refractory patients with cancerous tumors.

[0878] III.) Imaging Agent: Through binding a radionuclide (e.g., iodine or yttrium (I¹³¹, Y⁹⁰) to ant-PSCA antibodies, the radiolabeled antibodies are utilized as a diagnostic and/or imaging agent. In such a role, the labeled antibodies localize to both solid tumors, as well as, metastatic lesions of cells expressing PSCA. In connection with the use of the anti-PSCA antibodies as imaging agents, the antibodies are used as an adjunct to surgical treatment of solid tumors, as both a pre-surgical screen as well as a post-operative follow-up to determine what tumor remains and/or returns. In one embodiment, a (¹¹¹In)-PSCA antibody is used as an imaging agent in a Phase I human clinical trial in patients having a carcinoma that expresses PSCA (by analogy see, e.g., Divgi et al. J. Natl. Cancer Inst. 83:97-104 (1991)). Patients are followed with standard anterior and posterior gamma camera. The results indicate that primary lesions and metastatic lesions are identified.

[0879] Dose and Route of Administration

[0880] As appreciated by those of ordinary skill in the art, dosing considerations can be determined through comparison with the analogous products that are in the clinic. Thus, anti-PSCA antibodies can be administered with doses in the range of 5 to 400 mg/m², with the lower doses used, e.g., in connection with safety studies. The affinity of anti-PSCA antibodies relative to the affinity of a known antibody for its target is one parameter used by those of skill in the art for determining analogous dose regimens. Further, anti-PSCA antibodies that are fully human antibodies, as compared to the chimeric antibody, have slower clearance; accordingly, dosing in patients with such fully human anti-PSCA antibodies can be lower, perhaps in the range of 50 to 300 mg/m², and still remain efficacious. Dosing in mg/m², as opposed to the conventional measurement of dose in mg/kg, is a measurement based on surface area and is a convenient dosing measurement that is designed to include patients of all sizes from infants to adults.

[0881] Three distinct delivery approaches are useful for delivery of anti-PSCA antibodies. Conventional intravenous delivery is one standard delivery technique for many tumors. However, in connection with tumors in the peritoneal cavity, such as tumors of the ovaries, biliary duct, other ducts, and the like, intraperitoneal administration may prove favorable for obtaining high dose of antibody at the tumor and to also minimize antibody clearance. In a similar manner, certain solid tumors possess vasculature that is appropriate for regional perfusion. Regional perfusion allows for a high dose of antibody at the site of a tumor and minimizes short term clearance of the antibody.

[0882] Clinical Development Plan (CDP)

[0883] Overview: The CDP follows and develops treatments of anti-PSCA antibodies in connection with adjunctive therapy, monotherapy, and as an imaging agent. Trials initially demonstrate safety and thereafter confirm efficacy in repeat doses. Trails are open label comparing standard chemotherapy with standard therapy plus anti-PSCA antibodies. As will be appreciated, one criteria that can be utilized in connection with enrollment of patients is PSCA expression levels in their tumors as determined by biopsy.

[0884] As with any protein or antibody infusion-based therapeutic, safety concerns are related primarily to (i) cytokine release syndrome, i.e., hypotension, fever, shaking, chills; (ii) the development of an immunogenic response to the material (i.e., development of human antibodies by the patient to the antibody therapeutic, or HAHA response); and, (iii) toxicity to normal cells that express PSCA. Standard tests and follow-up are utilized to monitor each of these safety concerns. Anti-PSCA antibodies are found to be safe upon human administration.

### Example 41

### Human Clinical Trial Adjunctive Therapy with Human Anti-PSCA Antibody and Chemotherapeutic Agent

[0885] A phase I human clinical trial is initated to assess the safety of six intravenous doses of a human anti-PSCA antibody in connection with the treatment of a solid tumor, e.g., a cancer of a tissue listed in Table I. In the study, the safety of single doses of anti-PSCA antibodies when utilized as an adjunctive therapy to an antineoplastic or chemotherapeutic agent as defined herein, such as, without limitation: cisplatin, topotecan, doxorubicin, adriamycin, taxol, or the like, is assessed. The trial design includes delivery of six single doses of an ant-PSCA antibody with dosage of antibody escalating from approximately about 25 mg/m² to about 275 mg/m² over the course of the treatment in accordance with the following schedule:

| | Day 0 | Day 7 | Day 14 | Day 21 | Day 28 | Day 35 |
|---|---|---|---|---|---|---|
| mAb Dose | 25 | 75 | 125 | 175 | 225 | 275 |
| | mg/m² | mg/m² | mg/m² | mg/m² | mg/m² | mg/m² |
| Chemotherapy | + | + | + | + | + | + |
| (standard dose) | | | | | | |

[0886] Patients are closely followed for one-week following each administration of antibody and chemotherapy. In particular, patients are assessed for the safety concerns mentioned above: (i) cytokine release syndrome, i.e., hypotension, fever, shaking, chills; (ii) the development of an immunogenic response to the material (i.e., development of human antibodies by the patient to the human antibody therapeutic, or HAHA response); and, (iii) toxicity to normal cells that express PSCA. Standard tests and follow-up are utilized to monitor each of these safety concerns. Patients are also assessed for clinical outcome, and particularly reduction in tumor mass as evidenced by MRI or other imaging.

[0887] The anti-PSCA antibodies are demonstrated to be safe and efficacious, Phase II trials confirm the efficacy and refine optimum dosing.

### Example 42

### Human Clinical Trial: Monotherapy with Human Anti-PSCA Antibody

[0888] Anti-PSCA antibodies are safe in connection with the above-discussed adjunctive trial, a Phase II human clinical trial confirms the efficacy and optimum dosing for monotherapy. Such trial is accomplished, and entails the same safety and outcome analyses, to the above-described adjunctive trial with the exception being that patients do not receive chemotherapy concurrently with the receipt of doses of anti-PSCA antibodies.

### Example 43

### Human Clinical Trial: Diagnostic Imaging with Anti-PSCA Antibody

[0889] Once again, as the adjunctive therapy discussed above is safe within the safety criteria discussed above, a human clinical trial is conducted concerning the use of anti-PSCA antibodies as a diagnostic imaging agent. The protocol is designed in a substantially similar manner to those described in the art, such as in Divgi et al. J. Natl. Cancer Inst. 83:97-104 (1991). The antibodies are found to be both safe and efficacious when used as a diagnostic modality.

### Example 44

### Homology Comparison of PSCA v.4 to Known Sequences

[0890] The PSCA v.4 gene encodes a 189 aa protein. The human PSCA v.4 protein exhibit a high degree of homology to human prostate stem cell antigen (gi 27482160), exhibiting 98% identity to PSCA v.4 at the protein level (FIG. 4). The mouse homolog of PSCA v.4 has not been identified.

[0891] The PSCA v.4 protein has several variants (FIG. 11). These include 8 SNPs and a splice variant, referred to as PSCA v.3. The PSCA v.3 protein encompasses the C-termial portion of PSCA v.4, and corresponds to aa 94-189 of that variant. Bioinformatics analysis using topology prediction programs indicate that PSCA v.4 is a soluble protein with no transmembrane domains (Table L).

[0892] Motif analysis revealed the presence of two protein functional motifs in the PSCA v.4 protein (Table L), namely a cadherin motif and a granulin domain have been identified. Cadherins belong to a family of calcium-dependent cell adhesion molecules. They are single transmembrane proteins containing immunoglobulin like domains, and are involved in cell adhesion and sorting (Shan et al, Biophys Chem 1999, 82:157). For examples, cadherins mediate tissue-specific cell adhesion of lymphocytes to the surface of epithelial cells. Cadherins have been shown to function in tissue morphogenesis, cell adhesion, cell differentiation, cell migration and tumour metastasis (Yap A S, Kovacs E M. J Biol Chem 2003, 160:11; Vestweber D. Curr Opin Cell Biol 2002, 14:587; Bloom et al, Mol Biol Cell. 1999, 10:1521; Brodt P. Cancer Met Rev 1991, 10:23). Granulins or epithelins are growth factors originally purified from cell-conditioned media, shown to enhance cell proliferation (Xu, S. Q. et al, J. Biol. Chem. 1998, 273:20078). Granulins are expressed at elevated levels in several cancers, including gliomas and renal cancer (Liau L et al, Cancer Res. 60:1353, Donald, C. D et al, Anticancer Res. 21:3739).

[0893] The motifs found in PSCA v.4 indicate that PSCA v.4 can participate in tumor growth, and progression by regulating cell proliferation, cell adhesion, cell communication, invasion and metastasis.

[0894] Accordingly, when PSCA v.4 functions as a regulator of tumor establishment, tumor growth, tumor invasion, survival or cell signaling, PSCA v.4 is used for therapeutic, diagnostic, prognostic and/or preventative purposes. In addition, when a molecule, such as a splice variant or SNP of PSCA v.4 is expressed in cancerous tissues, such as those listed in Table I, they are used for therapeutic, diagnostic, prognostic and/or preventative purposes.

### Example 45

### Regulation of Transcription

[0895] The mitochondrial localization of PSCA v.4 coupled to the presence of cadherin domains within its sequence indicates that PSCA v.4 modulates the transcriptional regulation of eukaryotic genes. Regulation of gene expression is confirmed, e.g., by studying gene expression in cells expressing or lacking PSCA v.4. For this purpose, two types of experiments are performed.

[0896] In the first set of experiments, RNA from parental and PSCA v.4-expressing cells are extracted and hybridized to commercially available gene arrays (Clontech) (Smid-Koopman E et al. Br J Cancer. 2000. 83:246). Resting cells as well as cells treated with FBS, androgen or growth factors are compared. Differentially expressed genes are identified in accordance with procedures known in the art. The differentially expressed genes are then mapped to biological pathways (Chen K et al. Thyroid. 2001. 11:41.).

[0897] In the second set of experiments, specific transcriptional pathway activation is evaluated using commercially available (Stratagene) luciferase reporter constructs including: NFkB-luc, SRE-luc, ELK1-luc, ARE-luc, p53-luc, and CRE-luc. These transcriptional reporters contain consensus binding sites for known transcription factors that lie downstream of well-characterized signal transduction pathways, and represent a good tool to ascertain pathway activation and screen for positive and negative modulators of pathway activation.

[0898] Thus, PSCA v.4 plays a role in gene regulation, and it is used as a target for diagnostic, prognostic, preventative and/or therapeutic purposes.

### Example 46

### Identification and Confirmation of Potential Signal Transduction Pathways

[0899] Many mammalian proteins have been reported to interact with signaling molecules and to participate in regulating signaling pathways. (J Neurochem. 2001; 76:217-223). Cadherin molecules have been associated with Cdc42 and Rho signaling (Kouklis J Biol Chem. 2003, 278: 16230). Using immunoprecipitation and Western blotting techniques, proteins are identified that associate with PSCA v.4 and mediate signaling events. Several pathways known to play a role in cancer biology can be regulated by PSCA v.4, including phospholipid pathways such as PI3K, AKT, etc, adhesion and migration pathways, including FAK, Rho, Rac-1, catenin, etc, as well as mitogenic/survival cascades such as ERK, p38, etc (Cell Growth Differ. 2000,11:279; J Biol Chem. 1999, 274:801; Oncogene. 2000,19:3003, J. Cell Biol. 1997,138:913.).). In order to determine whether expression of PSCA v.4 is sufficient to regulate specific signaling pathways not otherwise active in resting cancer cells, the effect of PSCA v.4 on the activation of the signaling cascade is investigated in the cancer cell lines PA-1, Panc1 and Daudi. Cancer cells stably expressing PSCA v.4 or neo are stimulated with growth factor, FBS or other activating molecules. Whole cell lysates are analyzed by western blotting.

[0900] To confirm that PSCA v.4 directly or indirectly activates known signal transduction pathways in cells, luciferase (luc) based transcriptional reporter assays are carried out in cells expressing individual genes. These transcriptional reporters contain consensus-binding sites for known transcription factors that lie downstream of well-characterized signal transduction pathways. The reporters and examples of these associated transcription factors, signal transduction pathways, and activation stimuli are listed below.

[0901] 1. NFkB-luc, NFkB/Rel; Ik-kinase/SAPK; growth/apoptosis/stress

[0902] 2. SRE-luc, SRF/TCF/ELK1; MAPK/SAPK; growth/differentiation

[0903] 3. AP-1-luc, FOS/JUN; MAPK/SAPK/PKC; growth/apoptosis/stress

[0904] 4. ARE-luc, androgen receptor; steroids/MAPK; growth/differentiation/apoptosis

[0905] 5. p53-luc, p53; SAPK; growth/differentiation/apoptosis

[0906] 6. CRE-luc, CREB/ATF2; PKA/p38; growth/apoptosis/stress

[0907] 7. TCF-luc, TCF/Lef; □-catenin, Adhesion/invasion

[0908] Gene-mediated effects can be assayed in cells showing mRNA expression. Luciferase reporter plasmids can be introduced by lipid-mediated transfection (TFX-50, Promega). Luciferase activity, an indicator of relative transcriptional activity, is measured by incubation of cell extracts with luciferin substrate and luminescence of the reaction is monitored in a luminometer.

[0909] Signaling pathways activated by PSCA v.4 are mapped and used for the identification and validation of therapeutic targets. When PSCA v.4 is involved in cell signaling, it is used as target for diagnostic, prognostic, preventative and/or therapeutic purposes.

### Example 47

### Involvement in Tumor Progression

[0910] Based on the role of granulin and cadherin motifs in cell growth, adhesion and protein interactions, the PSCA v.4 gene can contribute to the growth, adhesion, invasion and transformation of cancer cells. The role of PSCA v.4 in tumor growth is confirmed in a variety of primary and transfected cell lines including prostate cell lines, as well as NIH 3T3 cells engineered to stably express PSCA v.4. Parental cells lacking PSCA v.4 and cells expressing PSCA v.4 are evaluated for cell growth using a well-documented proliferation assay (Fraser S P, Grimes J A, Djamgoz M B. Prostate. 2000;44:61, Johnson D E, Ochieng J, Evans S L. Anticancer Drugs. 1996, 7:288).

[0911] To confirm the role of PSCA v.4 in the transformation process, its effect in colony forming assays is investigated. Parental NIH-3T3 cells lacking PSCA v.4 are compared to NIH-3T3 cells expressing PSCA v.4, using a soft agar assay under stringent and more permissive conditions (Song Z. et al. Cancer Res. 2000;60:6730).

[0912] To confirm the role of PSCA v.4 in invasion and metastasis of cancer cells, a well-established assay is used, e.g., a Transwell Insert System assay (Becton Dickinson) (Cancer Res. 1999; 59:6010). Control cells, including prostate, pancreas and kidney cell lines lacking PSCA v.4 are compared to cells expressing PSCA v.4. Cells are loaded with the fluorescent dye, calcein, and plated in the top well of the Transwell insert coated with a basement membrane analog. Invasion is determined by fluorescence of cells in the lower chamber relative to the fluorescence of the entire cell population.

[0913] PSCA v.4 can also play a role in cell cycle and apoptosis. Parental cells and cells expressing PSCA v.4 are compared for differences in cell cycle regulation using a well-established BrdU assay (Abdel-Malek Z A. J Cell Physiol. 1988, 136:247). In short, cells are grown under both optimal (full serum) and limiting (low serum) conditions are labeled with BrdU and stained with anti-BrdU Ab and propidium iodide. Cells are analyzed for entry into the G1, S, and G2M phases of the cell cycle. Alternatively, the effect of stress on apoptosis is evaluated in control parental cells and cells expressing PSCA v.4, including normal and tumor prostate cells. Engineered and parental cells are treated with various chemotherapeutic agents, such as etoposide, taxol, etc, and protein synthesis inhibitors, such as cycloheximide. Cells are stained with annexin V-FITC and cell death is measured by FACS analysis. The modulation of cell death by PSCA v.4 can play a critical role in regulating tumor progression and tumor load.

[0914] When PSCA v.4 plays a role in cell growth, transformation, invasion or apoptosis, it is used as a target for diagnostic, prognostic, preventative and/or therapeutic purposes.

### Example 48

### Involvement in Angiogenesis

[0915] Angiogenesis or new capillary blood vessel formation is necessary for tumor growth (Hanahan D, Folkman J. Cell. 1996, 86:353; Folkman J. Endocrinology. 1998 139:441). Several assays have been developed to measure angiogenesis in vitro and in vivo, such as the tissue culture assays endothelial cell tube formation and endothelial cell proliferation. Using these assays as well as in vitro neo-vascularizaton, the role of PSCA v.4 in angiogenesis, enhancement or inhibition, is confirmed.

[0916] For example, endothelial cells engineered to express PSCA v.4 are evaluated using tube formation and proliferation assays. The effect of PSCA v.4 is also confirmed in animal models in vivo. For example, cells either expressing or lacking PSCA v.4 are implanted subcutaneously in immunocompromised mice. Endothelial cell migration and angiogenesis are evaluated 5-15 days later using immunohistochemistry techniques. PSCA v.4 affects angiogenesis, and it is used as a target for diagnostic, prognostic, preventative and/or therapeutic purposes.

### Example 49

### Involvement in Protein-Protein Interactions

[0917] Cadhesrin motifs have been shown to mediate interaction with other proteins. Using immunoprecipitation techniques as well as two yeast hybrid systems, proteins are identified that associate with PSCA v.4. Immunoprecipitates from cells expressing PSCA v.4 and cells lacking PSCA v.4 are compared for specific protein-protein associations.

[0918] Studies are performed to confirm the extent of association of PSCA v.4 with effector molecules, such as nuclear proteins, transcription factors, kinases, phosphates etc. Studies comparing PSCA v.4 positive and PSCA v.4 negative cells as well as studies comparing unstimulated/resting cells and cells treated with epithelial cell activators, such as cytokines, growth factors, androgen and anti-integrin Ab reveal unique interactions.

[0919] In addition, protein-protein interactions are confirmed using two yeast hybrid methodology (Curr Opin Chem Biol. 1999, 3:64). A vector carrying a library of proteins fused to the activation domain of a transcription factor is introduced into yeast expressing a PSCA v.4-DNA-binding domain fusion protein and a reporter construct. Protein-protein interaction is detected by colorimetric reporter activity. Specific association with effector molecules and transcription factors directs one of skill to the mode of action of PSCA v.4, and thus identifies therapeutic, prognostic, preventative and/or diagnostic targets for cancer. This and similar assays are also used to identify and screen for small molecules that interact with PSCA v.4.

[0920] Thus it is found that PSCA v.4 associates with proteins and small molecules. Accordingly, PSCA v.4 and these proteins and small molecules are used for diagnostic, prognostic, preventative and/or therapeutic purposes.

### Example 50

### Involvement of PSCA v.4 in Cell-Cell Communication

[0921] Cell-cell communication is essential in maintaining organ integrity and homeostasis, both of which become deregulated during tumor formation and progression. Based on the presence of a cadhesrin motif in PSCA v.4, a motif known to be involved in cell interaction and cell-cell adhesion, PSCA v.4 can regulate cell communication. Intercellular communications can be measured using two types of assays (J. Biol. Chem. 2000, 275:25207). In the first assay, cells loaded with a fluorescent dye are incubated in the presence of unlabeled recipient cells and the cell populations are examined under fluorescent microscopy. This qualitative assay measures the exchange of dye between adjacent cells. In the second assay system, donor and recipient cell populations are treated as above and quantitative measurements of the recipient cell population are performed by FACS analysis. Using these two assay systems, cells expressing PSCA v.4 are compared to controls that do not express PSCA v.4, and it is found that PSCA v.4 enhances cell communications. Small molecules and/or antibodies that modulate cell-cell communication mediated by PSCA v.4 are used as therapeutics for cancers that express PSCA v.4. When PSCA v.4 functions in cell-cell communication and small molecule transport, it is used as a target or marker for diagnostic, prognostic, preventative and/or therapeutic purposes.

[0922] Throughout this application, various website data content, publications, patent applications, and patents are referenced. (Websites are referenced by their Uniform Resource Locator, or URL, addresses on the World Wide Web.) The disclosures of each of these references are hereby incorporated by reference herein in their entireties. In addition, this application relates to U.S. Ser. No. 09/359,326, filed Jul. 20, 1999; U.S. Ser. No. 09/308,503, filed May 25, 1999; U.S. Ser. No. 09/251,835, filed Feb. 17, 1999; U.S. Ser. No. 09/203,939, filed Dec. 2, 1998; U.S. Ser. No. 09/038,261, filed Mar. 10, 1998; U.S. Ser. No. 08/814,279, filed Mar. 10, 1997; U.S. Ser. No. 60/071,141 filed Jan. 12, 1998; U.S. Ser. No. 60/074,675, filed Feb. 13, 1998; U.S. Ser. No. 60/124,658, filed Mar. 16, 1999; U.S. Ser. No. 60/120,536 filed Feb. 17, 1999; and 60/113,230 filed Dec. 21, 1998. The contents of all of the foregoing applications are fully incorporated by reference into the present application.

[0923] The present invention is not to be limited in scope by the embodiments disclosed herein, which are intended as single illustrations of individual aspects of the invention, and any that are functionally equivalent are within the scope of the invention. Various modifications to the models and methods of the invention, in addition to those described herein, will become apparent to those skilled in the art from the foregoing description and teachings, and are similarly intended to fall within the scope of the invention. Such modifications or other embodiments can be practiced without departing from the true scope and spirit of the invention.

[0924] Tables:

TABLE I
Tissues that Express PSCA:

| | |
|---|---|
| a. | Malignant Tissues |
| | Prostate |
| | Pancreas |
| | Bladder |
| | Kidney |
| | Colon |
| | Lung |
| | Ovary |
| | Breast |
| b. | Normal Tissues |

[0925] TABLE II
Amino Acid Abbreviations

| SINGLE LETTER | THREE LETTER | FULL NAME |
|---|---|---|
| F | Phe | phenylalanine |
| L | Leu | leucine |
| S | Ser | serine |
| Y | Tyr | tyrosine |
| C | Cys | cysteine |
| W | Trp | tryptophan |
| P | Pro | proline |
| H | His | histidine |
| Q | Gln | glutamine |
| R | Arg | arginine |
| I | Ile | isoleucine |
| M | Met | methionine |
| T | Thr | threonine |
| N | Asn | asparagine |
| K | Lys | lysine |
| V | Val | valine |
| A | Ala | alanine |
| D | Asp | aspartic acid |
| E | Glu | glutamic acid |
| G | Gly | glycine |

[0926] TABLE III
Amino Acid Substitution Matrix
Adapted from the GCG Software 9.0 BLOSUM62 amino acid substitution matrix (block substitution
matrix). The higher the value, the more likely a substitution is found in related, natural proteins.
(See world wide web URL ikp.unibe.ch/manual/blosum62.html)

| A | C | D | E | F | G | H | I | K | L | M | N | P | Q | R | S | T | V | W | Y | . |
|---|---|---|---|---|---|---|---|---|---|---|---|---|---|---|---|---|---|---|---|---|
| 4 | 0 | −2 | −1 | −2 | 0 | −2 | −1 | −1 | −1 | −1 | −2 | −1 | −1 | −1 | 1 | 0 | 0 | −3 | −2 | A |
| | 9 | −3 | −4 | −2 | −3 | −3 | −1 | −3 | −1 | −1 | −3 | −3 | −3 | −3 | −1 | −1 | −1 | −2 | −2 | C |
| | | 6 | 2 | −3 | −1 | −1 | −3 | −1 | −4 | −3 | 1 | −1 | 0 | −2 | 0 | −1 | −3 | −4 | −3 | D |
| | | | 5 | −3 | −2 | 0 | −3 | 1 | −3 | −2 | 0 | −1 | 2 | 0 | 0 | −1 | −2 | −3 | −2 | E |
| | | | | 6 | −3 | −1 | 0 | −3 | 0 | 0 | −3 | −4 | −3 | −3 | −2 | −2 | −1 | 1 | 3 | F |
| | | | | | 6 | −2 | −4 | −2 | −4 | −3 | 0 | −2 | −2 | −2 | 0 | −2 | −3 | −2 | −3 | G |
| | | | | | | 8 | −3 | −1 | −3 | −2 | 1 | −2 | 0 | 0 | −1 | −2 | −3 | −2 | 2 | H |
| | | | | | | | 4 | −3 | 2 | 1 | −3 | −3 | −3 | −3 | −2 | −1 | 3 | −3 | −1 | I |
| | | | | | | | | 5 | −2 | −1 | 0 | −1 | 1 | 2 | 0 | −1 | −2 | −3 | −2 | K |
| | | | | | | | | | 4 | 2 | −3 | −3 | −2 | −2 | −2 | −1 | 1 | −2 | −1 | L |
| | | | | | | | | | | 5 | −2 | −2 | 0 | −1 | −1 | −1 | 1 | −1 | −1 | M |
| | | | | | | | | | | | 6 | −2 | 0 | 0 | 1 | 0 | −3 | −4 | −2 | N |
| | | | | | | | | | | | | 7 | −1 | −2 | −1 | −1 | −2 | −4 | −3 | P |
| | | | | | | | | | | | | | 5 | 1 | 0 | −1 | −2 | −2 | −1 | Q |
| | | | | | | | | | | | | | | 5 | −1 | −1 | −3 | −3 | −2 | R |
| | | | | | | | | | | | | | | | 4 | 1 | −2 | −3 | −2 | S |
| | | | | | | | | | | | | | | | | 5 | 0 | −2 | −2 | T |
| | | | | | | | | | | | | | | | | | 4 | −3 | −1 | V |
| | | | | | | | | | | | | | | | | | | 11 | 2 | W |
| | | | | | | | | | | | | | | | | | | | 7 | Y |

Table IV:

[0927] HLA Class I/II Motifs/Supermotifs

TABLE IV (A)
HLA Class I Supermotifs/Motifs

| | POSITION | POSITION | POSITION |
|---|---|---|---|
| | 2 (Primary | 3 (Primary | C Terminus |
| | Anchor) | Anchor) | (Primary Anchor) |
| SUPERMOTIF | | | |
| A1 | TILVMS | | FWY |
| A2 | LIVMATQ | | IVMATL |
| A3 | VSMATLI | | RK |
| A24 | YFWIVLMT | | FIYWLM |
| B7 | P | | VILFMWYA |
| B27 | RHK | | FYLWMIVA |
| B44 | ED | | FWYLIMVA |
| B58 | ATS | | FWYLIVMA |
| B62 | QLIVMP | | FWYMIVLA |
| MOTIFS | | | |
| A1 | TSM | | Y |
| A1 | | DEAS | Y |
| A2.1 | LMVQIAT | | VLIMAT |
| A3 | LMVISATFCGD | | KYRHFA |
| A11 | VTMLISAGNCDF | | KRYH |
| A24 | YFWM | | FLIW |
| A*3101 | MVTALIS | | RK |
| A*3301 | MVALFIST | | RK |
| A*6801 | AVTMSLI | | RK |
| B*0702 | P | | LMFWYAIV |
| B*3501 | P | | LMFWYIVA |
| B51 | P | | LIVFWYAM |
| B*5301 | P | | IMFWYALV |
| B*5401 | P | | ATIVLMFWY |

Bolded residues are preferred, italicized residues are less preferred: A peptide is considered motif-bearing if it has primary anchors at each primary anchor position for a motif or supermotif as specified in the above table.

[0928] Bolded residues are preferred, italicized residues are less preferred: A peptide is considered motif-bearing if it has primary anchors at each primary anchor position for a motif or supermotif as specified in the above table.

TABLE IV (B)
HLA Class II Supermotif

| 1 | 6 | 9 |
|---|---|---|
| W, F, Y, V, .I, L | A, V, I, L, P, C, S, T | A, V, I, L, C, S, T, M, Y |

[0929] TABLE IV (C)
HLA Class II Motifs

| MOTIFS | | 1° anchor 1 | 2 | 3 | 4 | 5 | 1° anchor 6 | 7 | 8 | 9 |
|---|---|---|---|---|---|---|---|---|---|---|
| DR4 | preferred | FMYLIVW | M | T | | I | VSTCPALIM | MH | | MH |
| | deleterious | | | | W | | | R | | WDE |
| DR1 | preferred | MFLIVWY | | | PAMQ | | VMATSPLIC | M | | AVM |
| | deleterious | | C | CH | FD | CWD | | GDE | D | |
| DR7 | preferred | MFLIVWY | M | W | A | | IVMSACTPL | M | | IV |
| | deleterious | | C | | G | | | GRD | N | G |

| | | | | | | | |
|---|---|---|---|---|---|---|---|
| DR3 | MOTIFS | 1° anchor 1 | 2 | 3 | 1° anchor 4 | 5 | 1° anchor 6 |

| | | | |
|---|---|---|---|
| Motif a preferred | LIVMFY | D | |
| Motif b preferred | LIVMFAY | DNQEST | KRH |
| DR Supermotif | MFLIVWY | | VMSTACPLI |

Italicized residues indicate less preferred or “tolerated” residues

[0930] TABLE IV (D)
HLA Class I Supermotifs

| SUPER- | | POSITION: | | | | | | | | |
|---|---|---|---|---|---|---|---|---|---|---|
| MOTIFS | | 1 | 2 | 3 | 4 | 5 | 6 | 7 | 8 | C-terminus |
| A1 | | | 1° Anchor | | | | | | | 1° Anchor |
| | | | TILVMS | | | | | | | FWY |
| A2 | | | 1° Anchor | | | | | | | 1° Anchor |
| | | | \overline{LIVMATQ} | | | | | | | LIVMAT |
| A3 | Preferred | | 1° Anchor | YFW | | | YFW | YFW | P | 1° Anchor |
| | | | VSMATLI | (4/5) | | | (3/5) | (4/5) | (4/5) | RK |
| | deleterious | DE(3/5); | | DE | | | | | | |
| | | P(5/5) | | (4/5) | | | | | | |
| A24 | | | 1° Anchor | | | | | | | 1° Anchor |
| | | | \overline{YFWIVLMT} | | | | | | | FIYWLM |
| B7 | Preferred | FWY(5/5) | 1° Anchor | FWY | | | | | FWY | 1° Anchor |
| | | LIVM(3/5) | P | (4/5) | | | | | (3/5) | \overline{VILFMWYA} |
| | deleterious | DE(3/5); | | | | DE | G | QN | DE | |
| | | P(5/5); | | | | (3/5) | (4/5) | (4/5) | (4/5) | |
| | | G(4/5); | | | | | | | | |
| | | A(3/5); | | | | | | | | |
| | | QN(3/5) | | | | | | | | |
| B27 | | | 1° Anchor | | | | | | | 1° Anchor |
| | | | RHK | | | | | | | \overline{FYLWMIVA} |
| B44 | | | 1° Anchor | | | | | | | 1° Anchor |
| | | | ED | | | | | | | \overline{FWYLIMVA} |
| B58 | | | 1° Anchor | | | | | | | 1° Anchor |
| | | | ATS | | | | | | | \overline{FWYLIVMA} |
| B62 | | | 1° Anchor | | | | | | | 1° Anchor |
| | | | QLIVMP | | | | | | | \overline{FWYMIVLA} |

Italicized residues indicate less preferred or “tolerated” residues

[0931] TABLE IV (E)
HLA Class I Motifs

| | | POSITION | | | | | | | | | |
|---|---|---|---|---|---|---|---|---|---|---|---|
| | | | | | | | | | | 9 or | C- |
| | | 1 | 2 | 3 | 4 | 5 | 6 | 7 | 8 | C-terminus | terminus |
| A1 | preferred | GFYW | 1° Anchor | DEA | YFW | | P | DEQN | YFW | 1° Anchor | |
| 9-mer | | | STM | | | | | | | Y | |
| | deleterious | DE | | RHKLIVMP | A | G | A | | | | |
| A1 | preferred | GRHK | ASTCLIVM | 1° Anchor | GSTC | | ASTC | LIVM | DE | 1° Anchor | |
| 9-mer | | | | DEAS | | | | | | Y | |
| | deleterious | A | RHKDEPYFW | | DE | PQN | RHK | PG | GP | | |
| A1 | preferred | YFW | 1° Anchor | DEAQN | A | YFWQN | | PASTC | GDE | P | 1° Anchor |
| 10- | | | STM | | | | | | | | Y |
| mer | deleterious | GP | | RHKGLIVM | DE | RHK | QNA | RHKYFW | RHK | A | |
| A1 | preferred | YFW | STCLIVM | 1° Anchor | A | YFW | | PG | G | YFW | 1° Anchor |
| 10- | | | | DEAS | | | | | | | Y |
| mer | deleterious | RHK | RHKDEPYFW | | | P | G | | PRHK | QN | |
| A2.1 | preferred | YFW | 1° Anchor | YFW | STC | YFW | | A | P | 1° Anchor | |
| 9-mer | | | \overline{LMIVQAT} | | | | | | | VLIMAT | |
| | deleterious | DEP | | DERKH | | | RKH | DERKH | | | |

| | | POSITION: | | | | | | | | | C- |
|---|---|---|---|---|---|---|---|---|---|---|---|
| | | 1 | 2 | 3 | 4 | 5 | 6 | 7 | 8 | 9 | Terminus |
| A2.1 | pre- | AYFW | 1° Anchor | LVIM | G | | G | | FYWLVIM | | 1° Anchor |
| 10-mer | ferred | | \overline{LMIVQAT} | | | | | | | | VLIMAT |
| | dele- | DEP | | DE | RKHA | P | | RKH | DERKH | RKH | |
| | te- | | | | | | | | | | |
| | rious | | | | | | | | | | |
| A3 | pre- | RHK | 1° Anchor | YFW | PRHKYFW | A | YFW | | P | 1° Anchor | |
| | ferred | | \overline{LMVISATFCGD} | | | | | | | KYRHFA | |
| | dele- | DEP | | DE | | | | | | | |
| | te- | | | | | | | | | | |
| | rious | | | | | | | | | | |
| A11 | pre- | A | 1° Anchor | YFW | YFW | A | YFW | YFW | P | 1° Anchor | |
| | ferred | | \overline{VTLMISAGNCDF} | | | | | | | KRYH | |
| | dele- | DEP | | | | | | A | G | | |
| | te- | | | | | | | | | | |
| | rious | | | | | | | | | | |
| A24 | Pre- | YFWRHK | 1° Anchor | | STC | | | YFW | YFW | 1° Anchor | |
| 9-mer | ferred | | YFWM | | | | | | | FLIW | |
| | dele- | DEG | | DE | G | QNP | DERHK | G | AQN | | |
| | te- | | | | | | | | | | |
| | rious | | | | | | | | | | |
| A24 | Pre- | | 1° Anchor | | P | YFWP | | P | | | 1° Anchor |
| 10- | ferred | | YFWM | | | | | | | | FLIW |
| mer | Dele- | | | GDE | QN | RHK | DE | A | QN | DEA | |
| | te- | | | | | | | | | | |
| | rious | | | | | | | | | | |
| A3101 | Pre- | RHK | 1° Anchor | YFW | P | | YFW | YFW | AP | 1° Anchor | |
| | ferred | | \overline{MVTALIS} | | | | | | | RK | |
| | Dele- | DEP | | DE | | ADE | DE | DE | DE | | |
| | te- | | | | | | | | | | |
| | rious | | | | | | | | | | |
| A3301 | Pre- | | 1° Anchor | YFW | | | | AYFW | | 1° Anchor | |
| | ferred | | \overline{MVALFIST} | | | | | | | RK | |
| | Dele- | GP | | DE | | | | | | | |
| | te- | | | | | | | | | | |
| | rious | | | | | | | | | | |
| A6801 | Pre- | YFWSTC | 1° Anchor | | | YFWLIVM | | YFW | P | 1° Anchor | |
| | ferred | | \overline{AVTMSLI} | | | | | | | RK | |
| | dele- | GP | | DEG | | RHK | | | A | | |
| | te- | | | | | | | | | | |
| | rious | | | | | | | | | | |
| B0702 | Pre- | RHKFWY | 1° Anchor | RHK | | RHK | RHK | RHK | PA | 1° Anchor | |
| | ferred | | P | | | | | | | \overline{LMFWYAI} | |
| | | | | | | | | | | V | |

| | | POSITION | | | | | | | | | C- |
|---|---|---|---|---|---|---|---|---|---|---|---|
| | | | | | | | | | | 9 or | termi- |
| | | 1 | 2 | 3 | 4 | 5 | 6 | 7 | 8 | C-terminus | nus |
| A1 | pre- | GFYW | 1° Anchor | DEA | YFW | | P | DEQN | YFW | 1° Anchor | |
| 9-mer | ferred | | STM | | | | | | | Y | |
| | dele- | DE | | RHKLIVMP | A | G | A | | | | |
| | te- | | | | | | | | | | |
| | rious | | | | | | | | | | |
| A1 | pre- | GRHK | ASTCLIVM | 1° Anchor | GSTC | | ASTC | LIVM | DE | 1° Anchor | |
| 9-mer | ferred | | | DEAS | | | | | | Y | |
| | dele- | A | RHKDEPYFW | | DE | PQN | RHK | PG | GP | | |
| | te- | | | | | | | | | | |
| | rious | | | | | | | | | | |
| | dele- | DEQNP | | DEP | DE | DE | GDE | QN | DE | | |
| | te- | | | | | | | | | | |
| | rious | | | | | | | | | | |
| B3501 | Pre- | FWYLIVM | 1° Anchor | FWY | | | | FWY | | 1° Anchor | |
| | ferred | | P | | | | | | | \overline{LMFWYIVA} | |
| | dele- | AGP | | | | G | G | | | | |
| | te- | | | | | | | | | | |
| | rious | | | | | | | | | | |
| B51 | Pre- | LIVMFWY | 1° Anchor | FWY | STC | FWY | | G | FWY | 1° Anchor | |
| | ferred | | P | | | | | | | \overline{LIVFWYAM} | |
| | dele- | AGPDERHKSTC | | | | DE | G | DEQN | GDE | | |
| | te- | | | | | | | | | | |
| | rious | | | | | | | | | | |
| B5301 | pre- | LIVMFWY | 1° Anchor | FWY | STC | FWY | | LIVMFWY | FWY | 1° Anchor | |
| | ferred | | P | | | | | | | \overline{IMFWYALV} | |
| | dele- | AGPQN | | | | | G | RHKQN | DE | | |
| | te- | | | | | | | | | | |
| | rious | | | | | | | | | | |
| B5401 | pre- | FWY | 1° Anchor | FWYLIVM | | LIVM | | ALIVM | FWYAP | 1° Anchor | |
| | ferred | | P | | | | | | | \overline{ATIVLMFWY} | |
| | dele- | GPQNDE | | GDESTC | | RHKDE | DE | QNDGE | DE | | |
| | te- | | | | | | | | | | |
| | rious | | | | | | | | | | |

[0932] TABLE IV (F)
Summary of HLA-supertypes
Overall phenotypic frequencies of HLA-supertypes in different ethnic populations

| Specificity | | | Phenotypic frequency | | | | | |
|---|---|---|---|---|---|---|---|---|
| Supertype | Position 2 | C-Terminus | Caucasian | N.A. Black | Japanese | Chinese | Hispanic | Average |
| B7 | P | AILMVFWY | 43.2 | 55.1 | 57.1 | 43.0 | 49.3 | 49.5 |
| A3 | AILMVST | RK | 37.5 | 42.1 | 45.8 | 52.7 | 43.1 | 44.2 |
| A2 | AILMVT | AILMVT | 45.8 | 39.0 | 42.4 | 45.9 | 43.0 | 42.2 |
| A24 | YF (WIVLMT) | FI (YWLM) | 23.9 | 38.9 | 58.6 | 40.1 | 38.3 | 40.0 |
| B44 | E (D) | FWYLIMVA | 43.0 | 21.2 | 42.9 | 39.1 | 39.0 | 37.0 |
| A1 | TI (LVMS) | FWY | 47.1 | 16.1 | 21.8 | 14.7 | 26.3 | 25.2 |
| B27 | RHK | FYL (WMI) | 28.4 | 26.1 | 13.3 | 13.9 | 35.3 | 23.4 |
| B62 | QL (IVMP) | FWY (MIV) | 12.6 | 4.8 | 36.5 | 25.4 | 11.1 | 18.1 |
| B58 | ATS | FWY (LIV) | 10.0 | 25.1 | 1.6 | 9.0 | 5.9 | 10.3 |

[0933] TABLE IV (G)
Calculated population coverage afforded by different HLA-supertype combinations

| | Phenotypic frequency | | | | | |
|---|---|---|---|---|---|---|
| HLA-supertypes | Caucasian | N.A Blacks | Japanese | Chinese | Hispanic | Average |
| A2, A3 and B7 | 83.0 | 86.1 | 87.5 | 88.4 | 86.3 | 86.2 |
| A2, A3, B7, A24, B44 | 99.5 | 98.1 | 100.0 | 99.5 | 99.4 | 99.3 |
| and A1 | 99.9 | 99.6 | 100.0 | 99.8 | 99.9 | 99.8 |
| A2, A3, B7, A24 | | | | | | |
| B44, A1, B27, B62, | | | | | | |
| and B58 | | | | | | |

Motifs indicate the residues defining supertype specificites. The motifs incorporate residues determined on the basis of published data to be recognized by multiple alleles within the supertype. Residues within brackets are additional residues also predicted to be tolerated by multiple alleles within the supertype.

[0934] TABLE V
Frequently Occurring Motifs

| | avrg. % | | |
|---|---|---|---|
| Name | identity | Description | Potential Function |
| zf-C2H2 | 34% | Zinc finger, C2H2 type | Nucleic acid-binding protein functions as |
| | | | transcription factor, nuclear location |
| | | | probable |
| cytochrome_b_N | 68% | Cytochrome b(N- | membrane bound oxidase, generate |
| | | terminal)/b6/petB | superoxide |
| Ig | 19% | Immunoglobulin domain | domains are one hundred amino acids |
| | | | long and include a conserved |
| | | | intradomain disulfide bond. |
| WD40 | 18% | WD domain, G-beta repeat | tandem repeats of about 40 residues, |
| | | | each containing a Trp-Asp motif. |
| | | | Function in signal transduction and |
| | | | protein interaction |
| PDZ | 23% | PDZ domain | may function in targeting signaling |
| | | | molecules to sub-membranous sites |
| LRR | 28% | Leucine Rich Repeat | short sequence motifs involved in |
| | | | protein-protein interactions |
| Pkinase | 23% | Protein kinase domain | conserved catalytic core common to |
| | | | both serine/threonine and tyrosine |
| | | | protein kinases containing an ATP |
| | | | binding site and a catalytic site |
| PH | 16% | PH domain | pleckstrin homology involved in |
| | | | intracellular signaling or as constituents |
| | | | of the cytoskeleton |
| EGF | 34% | EGF-like domain | 30-40 amino-acid long found in the |
| | | | extracellular domain of membrane- |
| | | | bound proteins or in secreted proteins |
| Rvt | 49% | Reverse transcriptase | |
| | | (RNA-dependent DNA | |
| | | polymerase) | |
| Ank | 25% | Ank repeat | Cytoplasmic protein, associates integral |
| | | | membrane proteins to the cytoskeleton |
| Oxidored_q1 | 32% | NADH- | membrane associated. Involved in |
| | | Ubiquinone/plastoquinone | proton translocation across the |
| | | (complex I), various chains | membrane |
| Efhand | 24% | EF hand | calcium-binding domain, consists of a12 |
| | | | residue loop flanked on both sides by a |
| | | | 12 residue alpha-helical domain |
| Rvp | 79% | Retroviral aspartyl | Aspartyl or acid proteases, centered on |
| | | protease | a catalytic aspartyl residue |
| Collagen | 42% | Collagen triple helix repeat | extracellular structural proteins involved |
| | | 20 copies) | in formation of connective tissue. The |
| | | | sequence consists of the G-X-Y and the |
| | | | polypeptide chains forms a triple helix. |
| Fn3 | 20% | Fibronectin type III domain | Located in the extracellular ligand- |
| | | | binding region of receptors and is about |
| | | | 200 amino acid residues long with two |
| | | | pairs of cysteines involved in disulfide |
| | | | bonds |
| 7tm_1 | 19% | 7 transmembrane receptor | seven hydrophobic transmembrane |
| | | (rhodopsin family) | regions, with the N-terminus located |
| | | | extracellularly while the C-terminus is |
| | | | cytoplasmic. Signal through G proteins |

[0935] TABLE VI

Post-translational modifications of PSCA v.4

N-glycosylation site
91-94 NASL (SEQ ID NO:147)
cAMP- and cGMP-dependent protein kinase
phosphorylation
10-13 RRTS (SEQ ID NO:148)
Protein kinase C phosphorylation site
2-4 THR
12-14 TSR
35-37 SLR
51-53 SYR
N-myristoylation site
120-125 GSIDTD (SEQ ID NO:149)
Proline-rich region
18-134

[0936] TABLE VII

Search Peptides

Variant 1 aa 1-123: 9-mers, 10-mers, 15-mers (SEQ ID NO:150)

| | |
|---|---|
| MKAVLLALLM AGLALQPGTA LLCYSCKAQV SNEDCLQVEN CTQLGEQCWT ARIRAVGLLT | 60 |
| VISKGCSLNC VDDSQDYYVG KKNTTCCDTD LCNASGAHAL QPAAAILALL PALGLLLWGP | 120 |
| GQL | 123 |

v.4: aa 1-189: 9-mers, 10-mers, 15-mers (SEQ ID NO:151)

| | |
|---|---|
| MTHRTTTWAR RTSRAVTPTC ATPAGPMPCS RLPPSLRCSL HSACCSGDPA SYRLWGAPLQ | 60 |
| PTLGVVPQAS VPLLTHPAQW EPVLVPEAHP NASLTMYVCA PVPHPDPPMA LSRTPTRQIG | 120 |
| SIDTDPPADG PSNPLCCCFH GPAFSTLNPV LRHLFPQEAF PAHPIYDLSQ VWSVVSPAPS | 180 |
| RGQALRRAR | 189 |

PSCA v.19
9-mers aa 25-41
GPMPCSRLLPSLRCSLH (SEQ ID NO:152)
10-mers aa24-42
AGPMPCSRLLPSLRCSLHS (SEQ ID NO:153)
15-mers aa 19-47
TCATPAGPMPCSRLLPSLRCSLHSACCSG (SEQ ID NO:154)
PSCA v.20
9-mers aa 44-60
CCSGDPASSRLWGAPLQ (SEQ ID NO:155)
10-mers aa 43-61
ACCSGDPASSRLWGAPLQP (SEQ ID NO:156)
15-mers aa 38-66
CSLHSACCSGDPASSRLWGAPLQPTLGVV (SEQ ID NO:157)
PSCA v.21
9-mers aa 68-84
QASVPLLTDPAQWEPVL (SEQ ID NO:158)
10-mers aa 67-85
PQASVPLLTDPAQWEPVLV (SEQ ID NO:159)
15-mers aa 62-90
TLGVVPQASVPLLTDPAQWEPVLVPEAHP (SEQ ID NO:160)
PSCA v.21/22
9-mers aa 69-84
ASVPLLTDLAQWEPVL (SEQ ID NO:161)
10-mers aa 68-85
QASVPLLTDLAQWEPVLV (SEQ ID NO:162)
15-mers aa 63-90
LGVVPQASVPLLTDLAQWEPVLVPEAHP (SEQ ID NO:163)
PSCA v.22
9-mers aa 69-85
ASVPLLTHLAQWEPVLV (SEQ ID NO:164)
10-mers aa 68-86
QASVPLLTHLAQWEPVLVP (SEQ ID NO: 165)
15-mers aa 63-91
LGVVPQASVPLLTHLAQWEPVLVPEAHPN (SEQ ID NO:166)
PSCA v.24
9-mers aa 92-108
ASLTMYVCTPVPHPDP (SEQ ID NO:167)
10-mers aa 91-109
NASLTMYVCTPVPHPDPPM (SEQ ID NO:168)
15-mers aa 96-114
PEAHPNASLTMYVCTPVPHPDPPMALSRT (SEQ ID NO:169)
PSCA v.25
9-mers aa 112-128
SRTPTRQISSIDTDPPA (SEQ ID NO:170)
10-mers aa 111-129
LSRTPTRQTSSIDTDPPAD (SEQ ID NO:171)
15-mers aa 106-134
DPPMALSRTPTRQISSTDTDPPADGPSNP (SEQ ID NO:172)
PSCA v.25/26
9-mers aa 27-128
TPTRQISSSDTDPPA (SEQ ID NO:173)
10-mers aa 26-129
RTPTRQISSSDTDPPAD (SEQ ID NO:174)
15-mers aa 108-134
PMALSRTPTRQISSSDTDPPADGPSNP (SEQ ID NO:175)
PSCA v.26
9-mers aa 114-130
TPTRQIGSSDTDPPADG (SEQ ID NO:176)
10-mers aa 113-131
RTPTRQTGSSDTDPPADGP (SEQ ID NO:177)
15-mers aa 108-136
PMALSRTPTRQIGSSDTDPPADGPSNPLC (SEQ ID NO:178)
PSCA v.27
9-mers aa 181-189
RGQALRRAQ (SEQ ID NO:179)
10-mers aa 180-189
SRGQALRRAQ (SEQ ID NO:180)
15-mers aa 175-189
VSPAPSRGQALRRAQ (SEQ ID NO:181)

[0937] TABLE VIII

V1-HLA-A1-9MERS-
PSCA
Each peptide is a portion of SEQ
ID NO: 2; each start position is
specified, the length of peptide is 9
amino acids, and the end position
for each peptide is the start
position plus eight.

| | | |
|---|---|---|
| START | SUBSEQUENCE | SCORE |

| | | |
|---|---|---|
| 70 | CVDDSQDYY | 25.000 |
| 88 | DTDLCNASG | 2.500 |
| 44 | LGEQCWTAR | 2.250 |
| 74 | SQDYYVGKK | 1.500 |
| 37 | QVENCTQLG | 0.900 |
| 16 | QPGTALLCY | 0.625 |
| 73 | DSQDYYVGK | 0.600 |
| 69 | NCVDDSQDY | 0.500 |
| 86 | CCDTDLCNA | 0.500 |
| 56 | VGLLTVISK | 0.250 |
| 99 | ALQPAAAIL | 0.200 |
| 14 | ALQPGTALL | 0.200 |
| 19 | TALLCYSCK | 0.200 |
| 108 | ALLPALGLL | 0.100 |
| 30 | VSNEDCLQV | 0.075 |
| 85 | TCCDTDLCN | 0.050 |
| 107 | LALLPALGL | 0.050 |
| 2 | KAVLLALLM | 0.050 |
| 3 | AVLLALLMA | 0.050 |
| 104 | MILALLPAW | 0.050 |
| 71 | VDDSQDYYV | 0.050 |
| 18 | GTALLCYSC | 0.050 |
| 4 | VLLALLMAG | 0.050 |
| 32 | NEDCLQVEN | 0.050 |
| 7 | ALLMAGLAL | 0.050 |
| 109 | LLPALGLLL | 0.050 |
| 84 | ITCCDTDLC | 0.025 |
| 41 | CTQLGEQCW | 0.025 |
| 59 | LTVISKGCS | 0.025 |
| 31 | SNEDCLQVE | 0.022 |
| 22 | LCYSCKAQV | 0.020 |
| 106 | ILALLPALG | 0.020 |
| 8 | LLMAGLALQ | 0.020 |
| 91 | LCNASGAHA | 0.020 |
| 5 | LLALLMAGL | 0.020 |
| 98 | HALQPAAAI | 0.020 |
| 105 | AILALLPAL | 0.020 |
| 96 | GAHALQPAA | 0.020 |
| 93 | NASGAHALQ | 0.020 |
| 55 | AVGLLTVIS | 0.020 |
| 114 | GLLLWGPGQ | 0.020 |
| 66 | CSLNCVDDS | 0.015 |
| 46 | EQCWTARIR | 0.015 |
| 101 | QPAAAILAL | 0.013 |
| 110 | LPALGLLLW | 0.013 |
| 58 | LLTVISKGC | 0.010 |
| 115 | LLLWGPGQL | 0.010 |
| 13 | LALQPGTAL | 0.010 |
| 27 | KAQVSNEDC | 0.010 |
| 20 | ALLCYSCKA | 0.010 |
| 35 | CLQVENCTQ | 0.010 |
| 43 | QLGEQCWTA | 0.010 |
| 29 | QVSNEDCLQ | 0.010 |
| 34 | DCLQVENCT | 0.010 |
| 54 | RAVGLLTVI | 0.010 |
| 40 | NCTQLGEQC | 0.010 |
| 12 | GLALQPGTA | 0.010 |
| 83 | NITCCDTDL | 0.010 |
| 6 | LALLMAGLA | 0.010 |
| 21 | LLCYSCKAQ | 0.010 |
| 90 | DLCNASGAH | 0.010 |
| 60 | TVISKGCSL | 0.010 |
| 67 | SLNCVDDSQ | 0.010 |
| 10 | MAGLALQPG | 0.010 |
| 57 | GLLTVISKG | 0.010 |
| 62 | ISKGCSLNC | 0.008 |
| 94 | ASGAHALQP | 0.007 |
| 100 | LQPAAAILA | 0.007 |
| 15 | LQPGTALLC | 0.007 |
| 47 | QCWTARIRA | 0.005 |
| 52 | RIRAVGLLT | 0.005 |
| 78 | YVGKKNITC | 0.005 |
| 111 | PALGLLLWG | 0.005 |
| 11 | AGLALQPGT | 0.005 |
| 49 | WTARIRAVG | 0.005 |
| 103 | IMAILALLP | 0.005 |
| 24 | YSCKAQVSN | 0.003 |
| 39 | ENCTQLGEQ | 0.003 |
| 113 | LGLLLWGPG | 0.003 |
| 95 | SGAHALQPA | 0.003 |
| 9 | LMAGLALQP | 0.003 |
| 92 | CNASGAHAL | 0.003 |
| 53 | IRAVGLLTV | 0.003 |
| 50 | TARIRAVGL | 0.002 |
| 102 | PAAAILALL | 0.002 |
| 65 | GCSLNCVDD | 0.002 |
| 42 | TQLGEQCWT | 0.002 |
| 28 | AQVSNEDCL | 0.002 |
| 36 | LQVENCTQL | 0.002 |
| 112 | ALGLLLWGP | 0.001 |
| 45 | GEQCWTARI | 0.001 |
| 72 | DDSQDYYVG | 0.001 |
| 97 | AHALQPAAA | 0.001 |
| 1 | MKAVLLALL | 0.001 |
| 61 | VISKGCSLN | 0.001 |
| 76 | DYYVGKKNI | 0.001 |
| 48 | CWIARIRAV | 0.001 |
| 33 | EDCLQVENC | 0.001 |
| 81 | KKNITCCDT | 0.001 |
| 89 | TDLCNASGA | 0.001 |

[0938] TABLE VIII

V4-HLA-A1-9MERS-
PSCA
Each peptide is a portion of SEQ ID
NO:8; each start psoition is
specified, the length of peptide is 9
amino acids, and the end position
for each peptide is the start position
plus eight.

| | | |
|---|---|---|
| START | SUBSEQUENCE | SCORE |

| | | |
|---|---|---|
| 158 | EAFPAHPIY | 10.000 |
| 46 | SGDPASYRL | 2.500 |
| 104 | HPDPPMALS | 2.500 |
| 123 | DTDPPADGP | 1.250 |
| 44 | CCSGDPASY | 1.000 |
| 144 | FSTLNPVLR | 0.300 |
| 85 | VPEAHPNAS | 0.225 |
| 109 | MALSRTPTR | 0.200 |
| 136 | CCCFHGPAF | 0.200 |
| 173 | SVVSPAPSR | 0.200 |
| 131 | PSNPLCCCF | 0.150 |
| 45 | CSGDPASYR | 0.150 |
| 89 | HPNASLTMY | 0.125 |
| 21 | ATPAGPMPC | 0.125 |
| 113 | RTPTRQIGS | 0.125 |
| 145 | STLNPVLRH | 0.125 |
| 83 | VLVPEAHPN | 0.100 |
| 31 | RLPPSLRCS | 0.100 |
| 87 | EAHPNASLT | 0.100 |
| 23 | PAGPMPCSR | 0.100 |
| 146 | TLNPVLRHL | 0.100 |
| 174 | VVSPAPSRG | 0.100 |
| 121 | SIDTDPPAD | 0.100 |
| 79 | QWEPVLVPE | 0.090 |
| 165 | IYDLSQVWS | 0.050 |
| 94 | LTMYVCAPV | 0.050 |
| 127 | PADGPSNPL | 0.050 |
| 102 | VPHPDPPMA | 0.050 |
| 55 | WGAPLQPTL | 0.050 |
| 68 | QASVPLLTH | 0.050 |
| 120 | GSIDTDPPA | 0.030 |
| 92 | ASLTMYVCA | 0.030 |
| 168 | LSQVWSVVS | 0.030 |
| 172 | WSVVSPAPS | 0.030 |
| 105 | PDPPMALSR | 0.025 |
| 30 | SRLPPSLRC | 0.025 |
| 147 | LNPVLRHLF | 0.025 |
| 181 | RGQALRRAR | 0.025 |
| 176 | SPAPSRGQA | 0.025 |
| 16 | VTPTCATPA | 0.025 |
| 74 | LTHPAQWEP | 0.025 |
| 4 | RTTTWARRT | 0.025 |
| 6 | TTWARRTSR | 0.025 |
| 5 | TTTSARRTS | 0.025 |
| 91 | NASLTMYVC | 0.020 |
| 43 | ACCSGDPAS | 0.020 |
| 37 | RCSLHSACC | 0.020 |
| 15 | AVTPTCATP | 0.020 |
| 20 | CATPAGPMP | 0.020 |
| 84 | LVPEAHPNA | 0.020 |
| 65 | VVPQASVPL | 0.020 |
| 137 | CCFHGPAFS | 0.020 |
| 153 | HLFPQEAFP | 0.020 |
| 29 | CSRLPPSLR | 0.015 |
| 69 | ASVPLLTHP | 0.015 |
| 175 | VSPAPSRGQ | 0.015 |
| 38 | CSLHSACCS | 0.015 |
| 129 | DGPSNPLCC | 0.013 |
| 133 | NPLCCCFHG | 0.013 |
| 48 | DPASYRLWG | 0.013 |
| 57 | APLQPTLGV | 0.013 |
| 161 | PAHPIYDLS | 0.010 |
| 3 | HRTTTWARR | 0.010 |
| 42 | SACCSGDPA | 0.010 |
| 19 | TCATPAGPM | 0.010 |
| 58 | PLQPTLGVV | 0.010 |
| 14 | RAVTPTCAT | 0.010 |
| 64 | GVVPQASVP | 0.010 |
| 135 | LCCCFHGPA | 0.010 |
| 128 | ADGPSNPLC | 0.010 |
| 98 | VCAPVPHPD | 0.010 |
| 56 | GAPLQPTLG | 0.010 |
| 62 | TLGVVPQAS | 0.010 |
| 167 | DLSQVWSVV | 0.010 |
| 39 | SLHSACCSG | 0.010 |
| 70 | SVPLLTHPA | 0.010 |
| 179 | PSRGQALRR | 0.008 |
| 66 | VPQASVPLL | 0.005 |
| 124 | TDPPADGPS | 0.005 |
| 139 | FHGPAFSTL | 0.005 |
| 63 | LGVVPQASV | 0.005 |
| 125 | DPPADGPSN | 0.005 |
| 22 | TPAGPMPCS | 0.005 |
| 76 | HPAQWEPVL | 0.005 |
| 17 | TPTCATPAG | 0.005 |
| 112 | SRTPTRQIG | 0.005 |
| 71 | VPLLTHPAQ | 0.005 |
| 160 | FPAHPIYDL | 0.005 |
| 152 | RHLFPQEAF | 0.005 |
| 60 | QPTLGVVPQ | 0.005 |
| 178 | APSRGQALR | 0.005 |
| 27 | MPCSRLPPS | 0.005 |
| 155 | FPQEAFPAH | 0.005 |
| 61 | PTLGVVPQA | 0.005 |
| 12 | TSRAVTPTC | 0.003 |
| 156 | PQEAFPAHP | 0.003 |
| 138 | CFHGPAFST | 0.003 |
| 140 | HGPAFSTLN | 0.003 |
| 88 | AHPNASLTM | 0.003 |

[0939] TABLE VII

V19-HLA-A1-9MERS-
PSCA
Each peptide is a portion of SEQ
ID NO: 2; each start position is
specified, the length of peptide is 9
amino acids, and the end position
for each peptide is the start
position plus eight.

| | | |
|---|---|---|
| START | SUBSEQUENCE | SCORE |

| | | |
|---|---|---|
| 7 | RLLPSLRCS | 0.100 |
| 1 | GPMPCSRLL | 0.025 |
| 5 | CSRLLPSLR | 0.015 |
| 3 | MPCSRLLPS | 0.013 |
| 8 | LLPSLRCSL | 0.010 |
| 6 | SRLLPSLRC | 0.003 |
| 9 | LPSLRCSLH | 0.003 |
| 2 | PMPCSRLLP | 0.000 |
| 4 | PCSRLLPSL | 0 000 |

[0940] TABLE VIII

V20-HLA-A1-9MERS
PSCA
Each peptide is a portion of SEQ
ID NO: 8; each start position is
specified, the length of peptide is 9
amino acids, and the end position
for each peptide is the start
position plus eight.

| | | |
|---|---|---|
| START | SUBSEQUENCE | SCORE |

| | | |
|---|---|---|
| 3 | SGDPASSRL | 1.250 |
| 2 | CSGDPASSR | 0.150 |
| 1 | CCSGDPASS | 0.020 |
| 5 | DPASSRLWG | 0.013 |
| 8 | SSRLWGAPL | 0.003 |
| 6 | PASSRLWGA | 0.001 |
| 9 | SRLWGAPLQ | 0.001 |
| 4 | GDPASSRLW | 0.001 |
| 7 | ASSRLWGAP | 0.000 |

[0941] TABLE VIII

V22-HLA-A1-9MERS-
PSCA
Each peptide is a portion of SEQ ID
NO: 8; each start position is
specified, the length of peptide is 9
amino acids, and the end position
for each peptide is the start position
plus eight.

| | | |
|---|---|---|
| START | SUBSEQUENCE | SCORE |

| | | |
|---|---|---|
| 1 | ASYPLLTHL | 0.150 |
| 8 | HLAQWEPVL | 0.020 |
| 9 | LAQWEPVLV | 0.020 |
| 3 | VPLLTHLAQ | 0.013 |
| 2 | SVPLLTHLA | 0.010 |
| 6 | LTHLAQWEP | 0.003 |
| 4 | PLLTHLAQW | 0.002 |
| 5 | LLTHLAQWE | 0.001 |
| 7 | THLAQWEPV | 0.001 |

[0942] TABLE VIII

V24-HLA-A1-9MERS-
PSCA
Each is a portion of SEQ ID
NO: 8; each start position is
specified, the length of peptide is 9
amino acids, and the end position
for each peptide is the start position
plus eight.

| | | |
|---|---|---|
| START | SUBSEQUENCE | SCORE |

| | | |
|---|---|---|
| 1 | ASLTMYVCT | 0.030 |
| 3 | LTMYVCTPV | 0.025 |
| 7 | VCTPVPHPD | 0.010 |
| 8 | CTPVPHPDP | 0.005 |
| 6 | YVCTPVPHP | 0.002 |
| 4 | TMYVCTPVP | 0.001 |
| 2 | SLTMYVCTP | 0.001 |
| 5 | MYVCTPVPH | 0.001 |

[0943] TABLE VIII-V21-HLA-A1-9MERS-PSCA

Each peptide is a portion of SEQ
ID NO: 8; each start position is
specified, the length of peptide is 9
amino acids, and the end position
for each peptide is the start
position plus eight.

| | | |
|---|---|---|
| START | SUBSEQUENCE | SCORE |

| | | |
|---|---|---|
| 7 | LTDPAQWEP | 1.250 |
| 2 | ASVPLLTDP | 0.015 |
| 3 | SVPLLTDPA | 0.010 |
| 9 | DPAQWEPVL | 0.005 |
| 1 | QASVPLLTD | 0.005 |
| 4 | VPLLTDPAQ | 0.005 |
| 5 | PLLTDPAQW | 0.002 |
| 6 | LLTDPAQWE | 0.001 |
| 8 | TDPAQWEPV | 0.001 |

[0944] TABLEVIII-V21&V22-HLA-A1-9MERS-PSCA

Each peptide is a portion of SEQ ID
NO: 8; each start position is
specified, the length of peptide is 9
amino acids, and the end position
for each peptide is the start
position plus eight.

| | | |
|---|---|---|
| START | SUBSEQUENCE | SCORE |

| | | |
|---|---|---|
| 1 | ASVPLLTDL | 0.150 |
| 6 | LTDLAQWEP | 0.125 |
| 8 | DLAQWEPVL | 0.020 |
| 3 | VPLLTDLAQ | 0.013 |
| 2 | SVPLLTDLA | 0.010 |
| 4 | PLLTDLAQW | 0.002 |
| 5 | LLTDLAQWE | 0.001 |
| 7 | TDLAQWEPV | 0.001 |

[0945] TABLE VIII

V26-HLA-A1-9MERS-
PSCA
Each peptide is a portion of SEQ
ID NO: 8; each start position is
specified, the length of peptide is 9
amino acids, and the end position
for each peptide is the start
position plus eight.

| | | |
|---|---|---|
| START | SUBSEQUENCE | SCORE |

| | | |
|---|---|---|
| 8 | SSDTDPPAD | 0.150 |
| 7 | GSSDTDPPA | 0.030 |
| 9 | SDTDPPADG | 0.001 |
| 5 | QIGSSDTDP | 0.001 |
| 3 | TRQIGSSDT | 0.001 |
| 6 | IGSSDTDPP | 0.000 |
| 1 | TPTRQIGSS | 0.000 |
| 4 | RQIGSSDTD | 0.000 |
| 2 | PTRQIGSSD | 0.000 |

[0946] TABLE VIII

V27-HLA-A1-9MERS-
PSCA
Each peptide is a portion of SEQ
ID NO: 8; each start position is
specified, the length of peptide is 9
amino acids, and the end position
for each peptide is the start
position plus eight.

| | | |
|---|---|---|
| START | SUBSEQUENCE | SCORE |

| | | |
|---|---|---|
| 2 | RGQALRRAQ | 0.003 |
| 1 | SRGQALRRA | 0.001 |

[0947] TABLE IX

V1-HLA-A1-10MERS-
PSCA
Each peptide is a portion of SEQ ID
NO: 2; each start position is
specified, the length of peptide is 10
amino acids, and the end position
for each peptide is the start
position plus nine.

| | | |
|---|---|---|
| START | SUBSEQUENCE | SCORE |

| | | |
|---|---|---|
| 88 | DTDLCNASGA | 1.250 |
| 70 | CVDDSQDYYV | 1.000 |
| 55 | AVGLLTVISK | 1.000 |
| 108 | ALLPALGLLL | 0.500 |
| 99 | ALQPAAAILA | 0.500 |
| 14 | ALQPGTALLC | 0.500 |
| 86 | CCDTDLCNAS | 0.500 |
| 18 | GTALLCYSCK | 0.500 |
| 69 | NCVDDSQDYY | 0.500 |
| 31 | SNEDCLQVEN | 0.450 |
| 44 | LGEQCWTARI | 0.450 |
| 37 | QVENCTQLGE | 0.450 |
| 15 | LQPGTALLCY | 0.375 |
| 73 | DSQDYYVGKK | 0.300 |
| 84 | ITCCDTDLCN | 0.125 |
| 68 | LNCVDDSQDY | 0.125 |
| 43 | QLGEQCWTAR | 0.100 |
| 74 | SQDYYVGKKN | 0.075 |
| 29 | QVSNEDCLQV | 0.050 |
| 3 | AVLLALLMAG | 0.050 |
| 103 | AAAILALLPA | 0.050 |
| 109 | LLPALGLLLW | 0.050 |
| 6 | LALLMAGLAL | 0.050 |
| 2 | KAVLLALLMA | 0.050 |
| 106 | ILALLPALGL | 0.050 |
| 71 | VDDSQDYYVG | 0.050 |
| 41 | CTQLGEQCWT | 0.025 |
| 32 | NEDCLQVENC | 0.025 |
| 59 | LTVISKGCSL | 0.025 |
| 4 | VLLALLMAGL | 0.020 |
| 72 | DDSQDYYVGK | 0.020 |
| 10 | MAGLALQPGT | 0.020 |
| 104 | AAILALLPAL | 0.020 |
| 21 | LLCYSCKAQV | 0.020 |
| 96 | GAHALQPAAA | 0.020 |
| 105 | AILALLPALG | 0.020 |
| 90 | DLCNASGAHA | 0.020 |
| 13 | LALQPGTALL | 0.020 |
| 98 | HALQPAAAIL | 0.020 |
| 7 | ALLMAGLALQ | 0.020 |
| 54 | RAVGLLTVIS | 0.020 |
| 94 | ASGAHALQPA | 0.015 |
| 66 | CSLNCVDDSQ | 0.015 |
| 10 | LPALGLLLWG | 0.013 |
| 12 | GLALQPGTAL | 0.010 |
| 85 | TCCDTDLCNA | 0.010 |
| 20 | ALLCYSCKAQ | 0.010 |
| 22 | LCYSCKAQVS | 0.010 |
| 5 | LLALLMAGLA | 0.010 |
| 35 | CLQVENCTQL | 0.010 |
| 58 | LLTVISKGCS | 0.010 |
| 19 | TALLCYSCKA | 0.010 |
| 60 | TYISKGCSLN | 0.010 |
| 34 | DCLQVENCTQ | 0.010 |
| 114 | GLLLWGPGQL | 0.010 |
| 27 | KAQVSNEDCL | 0.010 |
| 112 | ALGLLLWGPG | 0.010 |
| 107 | LALLPALGLL | 0.010 |
| 65 | GCSLNCVDDS | 0.010 |
| 91 | LCNASGAHAL | 0.010 |
| 40 | NCTQLGEQCW | 0.010 |
| 57 | GLLTVISKGC | 0.010 |
| 83 | NITCCDTDLC | 0.010 |
| 46 | EQCWTARIRA | 0.007 |
| 100 | LQPAAAILAL | 0.007 |
| 61 | VISKGCSLNC | 0.005 |
| 92 | CNASGAHALQ | 0.005 |
| 95 | SGAHALQPAA | 0.005 |
| 45 | GEQCVVTARV | 0.005 |
| 52 | RIRAVGLLTV | 0.005 |
| 113 | LGLLLWGPGQ | 0.005 |
| 93 | NASGAHALQP | 0.005 |
| 49 | WTARIRAVGL | 0.005 |
| 8 | LLMAGLALQP | 0.005 |
| 9 | LMAGLALQPG | 0.005 |
| 101 | QPAAAILALL | 0.005 |
| 77 | YYVGKKNITC | 0.003 |
| 82 | KNITCCDTDL | 0.003 |
| 11 | AGLALQPGTA | 0.003 |
| 16 | QPGTALLCYS | 0.003 |
| 1 | MKAVLLALLM | 0.003 |
| 56 | VGLLTVISKG | 0.003 |
| 39 | ENCTQLGEQC | 0.003 |
| 62 | ISKGCSLNCV | 0.002 |
| 30 | VSNEDCLQVE | 0.002 |
| 28 | AQVSNEDCLQ | 0.002 |
| 36 | LQVENCTQLG | 0.002 |
| 42 | TQLGEQCWTA | 0.002 |
| 48 | CWTARIRAVG | 0.001 |
| 67 | SLNCVDDSQD | 0.001 |
| 78 | YVGKKNITCC | 0.001 |
| 87 | CDTDLCNASG | 0.001 |
| 97 | AHALQPAAAI | 0.001 |
| 47 | QCWTARIRAV | 0.001 |
| 23 | CYSCKAQVSN | 0.001 |
| 50 | TARIRAVGLE | 0.001 |
| 102 | PAAAILALLP | 0.001 |
| 26 | CKAQVSNEDC | 0.001 |
| 89 | TDLCNASGAH | 0.001 |
| 38 | VENCTQLGEQ | 0.001 |

[0948] TABLEVIII-V25-HLA-A1-9MERS-PSCA

Each peptide is a portion of SEQ
ID NO: 8; each start position is
specified, the length of peptide is 9
amino acids, and the end position
for each peptide is the start
position plus eight.

| | | |
|---|---|---|
| START | SUBSEQUENCE | SCORE |

| | | |
|---|---|---|
| 2 | RTPTRQISS | 0.125 |
| 9 | SSIDTDPPA | 0.030 |
| 1 | SRTPTRQIS | 0.005 |
| 5 | TRQISSIDT | O.003 |
| 8 | ISSIDTDPP | 0.002 |
| 7 | QISSIDTDP | 0.001 |
| 3 | TPTRQISSI | 0.000 |
| 6 | RQISSIDTD | 0.000 |
| 4 | PTRQISSID | 0.000 |

[0949] TABLEVIII-V25&26-HLA-A1-9MERS-PSCA

Each peptide is a portion of SEQ
ID NO: 8; each start position is
specified, the length of peptide is 9
amino acids, and the end position
for each peptide is the start
position plus eight.

| | | |
|---|---|---|
| START | SUBSEQUENCE | SCORE |

| | | |
|---|---|---|
| 7 | SSSDTDPPA | 0.030 |
| 6 | ISSSDTDPP | 0.002 |
| 5 | QISSSDTDP | 0.001 |
| 3 | TRQISSSDT | 0.001 |
| 1 | TPTRQISSS | 0.000 |
| 4 | RQISSSDTD | 0.000 |
| 2 | PTRQISSSD | 0.000 |

[0950] TABLE IX

V4-HLA-A1-10MERS-
PSCA
Each peptide is a portion of SEQ ID
NO: 8; each start position is
specified, the length of peptide is 10
amino acids, and the end position
for each peptide is the start position
plus nine.

| | | |
|---|---|---|
| START | SUBSEQUENCE | SCORE |

| | | |
|---|---|---|
| 104 | HPDPPMALSR | 62.500 |
| 123 | DTDPPADGPS | 12.500 |
| 46 | SGDPASYRLW | 1.250 |
| 43 | ACCSGDPASY | 1.000 |
| 121 | SIDTDPPADG | 1.000 |
| 146 | TLNPVLRHLF | 1.000 |
| 79 | QWEPVLVPEA | 0.900 |
| 20 | CATPAGPMPC | 0.500 |
| 87 | EAHPNASLTM | 0.500 |
| 153 | HLFPQEAFPA | 0.500 |
| 85 | VPEAHPNASL | 0.450 |
| 172 | WSVVSPAPSR | 0.300 |
| 5 | TTTWARRTSR | 0.250 |
| 74 | LTHPAQWEPV | 0.250 |
| 135 | LCCCFHGPAF | 0.200 |
| 64 | GVVPQASVPL | 0.200 |
| 83 | VLVPEAHPNA | 0.200 |
| 69 | ASVPLLTHPA | 0.150 |
| 102 | VPHPDPPMAL | 0.125 |
| 31 | RLPPSLRCSL | 0.100 |
| 127 | PADGPSNPLC | 0.100 |
| 44 | CCSGDPASYR | 0.100 |
| 174 | VVSPAPSRGQ | 0.100 |
| 15 | AVTPTCATPA | 0.100 |
| 144 | FSTLNPVLRH | 0.075 |
| 157 | QEAFPAHPIY | 0.050 |
| 21 | ATPAGPMPCS | 0.050 |
| 158 | EAFPAHPIYD | 0.050 |
| 16 | VTPTCATPAG | 0.050 |
| 100 | APVPHPDPPM | 0.050 |
| 137 | CCFHGPAFST | 0.050 |
| 56 | GAPLQPTLGV | 0.050 |
| 161 | PAHPIYDLSQ | 0.050 |
| 45 | CSGDPASYRL | 0.030 |
| 88 | AHPNASLTMY | 0.025 |
| 145 | STLNPVLRHL | 0.025 |
| 4 | RTTTWARRTS | 0.025 |
| 130 | GPSNPLCCCF | 0.025 |
| 165 | IYDLSQVWSV | 0.025 |
| 1 | MTHRTTTWAR | 0.025 |
| 22 | TPAGPMPCSR | 0.025 |
| 113 | RTPTRQIGSI | 0.025 |
| 128 | ADGPSNPLCC | 0.025 |
| 176 | SPAPSRGQAL | 0.025 |
| 112 | SRTPTRQIGS | 0.025 |
| 55 | WGAPLQPTLG | 0.025 |
| 42 | SACCSGDPAS | 0.020 |
| 167 | DLSQVWSVVS | 0.020 |
| 91 | NASLTMYVCA | 0.020 |
| 98 | VCAPVPHPDP | 0.020 |
| 136 | CCCFHGPAFS | 0.020 |
| 65 | WPQASVPLLJ | 0.020 |
| 62 | TLGVVPQASV | 0.020 |
| 93 | SLTMYVCAPV | 0.020 |
| 177 | PAPSRGQALR | 0.020 |
| 70 | SVPLLTHPAQ | 0.020 |
| 131 | PSNPLCCCFH | 0.015 |
| 175 | VSPAPSRGQA | 0.015 |
| 38 | CSLHSACCSG | 0.015 |
| 41 | HSACCSGDPA | 0.015 |
| 156 | PQEAFPAHPI | 0.013 |
| 66 | VPQASVPLLT | 0.013 |
| 89 | HPNASLTMYV | 0.013 |
| 25 | GPMPCSRLPP | 0.013 |
| 132 | SNPLCCCFHG | 0.013 |
| 148 | NPVLRHLFPQ | 0.013 |
| 178 | APSRGQALRR | 0.013 |
| 37 | RCSLHSACCS | 0.010 |
| 95 | TMYVCAPVPH | 0.010 |
| 23 | PAGPMPCSRL | 0.010 |
| 84 | LVPEAHPNAS | 0.010 |
| 173 | SVVSPAPSRG | 0.010 |
| 143 | AFSTLNPVLR | 0.010 |
| 108 | PMALSRTPTR | 0.010 |
| 124 | TDPPADGPSN | 0.010 |
| 109 | MALSRTPTRQ | 0.010 |
| 29 | CSRLPPSLRC | 0.008 |
| 76 | HPAQWEPVLV | 0.005 |
| 94 | LTMYVCAPVP | 0.005 |
| 119 | IGSIDTDPPA | 0.005 |
| 180 | SRGQALRRAR | 0.005 |
| 139 | FHGPAFSTLN | 0.005 |
| 11 | RTSRAVTPTC | 0.005 |
| 60 | QPTLGVVPQA | 0.005 |
| 27 | MPCSRLPPSL | 0.005 |
| 71 | VPLLTHPAQW | 0.005 |
| 151 | LRHLFPQEAF | 0.005 |
| 30 | SRLPPSLRCS | 0.005 |
| 168 | LSQVWSVVSP | 0.003 |
| 120 | GSIDTDPPAD | 0.003 |
| 50 | ASYRLWGAPL | 0.003 |
| 59 | LQPTLGVVPQ | 0.003 |
| 48 | DPASYRLWGA | 0.003 |
| 129 | DGPSNPLCCC | 0.003 |
| 141 | GPAFSTLNPV | 0.003 |
| 160 | FPAHPIYDLS | 0.003 |
| 163 | HPIYDLSQVW | 0.003 |
| 57 | APLQPTLGVV | 0.003 |
| 18 | PTCATPAGPM | 0.003 |
| 47 | GDPASYRLWG | 0.003 |

[0951] TABLE IX

V19-HLA-A1-10MERS-
PSCA
Each peptide is a portion of SEQ ID
NO: 8; each start position is
specified, the length of peptide is 10
amino acids, and the end position
for each peptide is the start position
plus nine.

| | | |
|---|---|---|
| START | SUBSEQUENCE | SCORE |

| | | |
|---|---|---|
| 8 | RLLPSLRCSL | 0.100 |
| 10 | LPSLRCSLHS | 0.013 |
| 2 | GPMPCSRLLP | 0.013 |
| 9 | LLPSLRCSLH | 0.010 |
| 6 | CSRLLPSLRC | 0.008 |
| 4 | MPCSRLLPSL | 0.005 |
| 1 | AGPMPCSRLL | 0.003 |
| 3 | PMPCSRLLPS | 0.003 |
| 5 | PCSRLLPSLR | 0.001 |
| 7 | SRLLPSLRCS | 0.001 |

[0952] TABLE IX

V20-HLA-A1-10MERS-
PSCA
Each peptide is a portion of SEQ ID
NO: 8; each start position is
specified, the length of peptide is 10
amino acids, and the end position
for each peptide is the start position
plus nine.

| | | |
|---|---|---|
| START | SUBSEQUENCE | SCORE |

| | | |
|---|---|---|
| 4 | SGDPASSRLW | 1.250 |
| 2 | CCSGDPASSR | 0.100 |
| 1 | ACCSGDPASS | 0.020 |
| 3 | CSGDPASSRL | 0.015 |
| 8 | ASSRLWGAPL | 0.003 |
| 9 | SSRLWGAPLQ | 0.003 |
| 6 | DPASSRLWGA | 0.003 |
| 5 | GDPASSRLWG | 0.003 |
| 10 | SRLWGAPLQP | 0.000 |
| 7 | PASSRLWGAP | 0.000 |

[0953] TABLE IX

V21-HLA-A1-10MERS-
PSCA
Each peptide is a portion of SEQ
ID NO: 8; each start position is
specified, the length of peptide is
10 amino acids, and the end
position for each peptide is the
start position plus nine.

| | | |
|---|---|---|
| START | SUBSEQUENCE | SCORE |

| | | |
|---|---|---|
| 8 | LTDPAQWEPV | 12.500 |
| 3 | ASVPLLTDPA | 0.150 |
| 4 | SVPLLTDPAQ | 0.020 |
| 5 | VPLLTDPAQW | 0.005 |
| 10 | DPAQWEPVLV | 0.005 |
| 7 | LLTDPAQWEP | 0.001 |
| 9 | TDPAQWEPVL | 0.001 |
| 2 | QASVPLLTDP | 0.001 |
| 6 | PLLTDPAQWE | 0.000 |
| 1 | PQASVPLLTD | 0.000 |

[0954] TABLE IX

V21&22-HLA-A1-
10MERS-PSCA
Each peptide is a portion of SEQ
ID NO: 8; each start position is
specified, the length of peptide is
10 amino acids, and the end
position for each peptide is the
start position plus nine.

| | | |
|---|---|---|
| START | SUBSEQUENCE | SCORE |

| | | |
|---|---|---|
| 7 | LTDLAQWEPV | 1.250 |
| 2 | ASVPLLTDLA | 0.150 |
| 3 | SVPLLTDLAQ | 0.050 |
| 9 | DLAQWEPVLV | 0.020 |
| 1 | QASVPLLTDL | 0.010 |
| 4 | VPLLTDLAQW | 0.005 |
| 6 | LLTDLAQWEP | 0.001 |
| 8 | TDLAQWEPVL | 0.001 |
| 5 | PLLTDLAQWE | 0.000 |

[0955] TABLE IX

V22-HLA-A1-10MERS-
PSCA
Each peptide is a portion of SEQ
ID NO: 8; each start position is
specified, the length of peptide is
10 amino acids, and the end
position for each peptide is the
start position plus nine.

| | | |
|---|---|---|
| START | SUBSEQUENCE | SCORE |

| | | |
|---|---|---|
| 2 | ASVPLLTHLA | 0.150 |
| 3 | SVPLLTHLAQ | 0.050 |
| 7 | LTHLAQWEPV | 0.025 |
| 9 | HLAQWEPVLV | 0.020 |
| 1 | QASYPLLTHL | 0.010 |
| 10 | LAQWEPVLVP | 0.005 |
| 4 | VPLLTHLAQW | 0.005 |
| 6 | LLTHLAQWEP | 0.001 |
| 8 | THLAQWEPVL | 0.001 |
| 5 | PLLTHLAQWE | 0.000 |

[0956] TABLE IX

V24-HLA-A1-10MERS-
PSCA
Each peptide is a portion of SEQ ID
NO: 8; each start position is
specified, the length of peptide is 10
amino acids, and the end position
for each peptide is the start position
plus nine.

| | | |
|---|---|---|
| START | SUBSEQUENCE | SCORE |

| | | |
|---|---|---|
| 10 | TPVPHPDPPM | 0.050 |
| 1 | NASLTMYVCT | 0.020 |
| 8 | VCTPVPHPDP | 0.020 |
| 5 | TMYVCTPVPH | 0.010 |
| 3 | SLTMYVCTPV | 0.010 |
| 4 | LTMYVCTPVP | 0.005 |
| 9 | CTPVPHPDPP | 0.003 |
| 2 | ASLTMYVCTP | 0.002 |
| 7 | YVCTPVPHPD | 0.001 |
| 6 | MYVCTPVPHP | 0.000 |

[0957] TABLE IX

V22-HLA-A1-10MERS-
PSCA
Each peptide is a portion of SEQ ID
ID NO: 8; each start position is
specified, the length of peptide is 10
amino acids, and the end position
for each peptide is the start position
plus nine.

| | | |
|---|---|---|
| START | SUBSEQUENCE | SCORE |

| | | |
|---|---|---|
| 9 | ISSIDTDPPA | 0.030 |
| 2 | SRTPTRQISS | 0.025 |
| 3 | RTPTRQISSI | 0.025 |
| 10 | SSIDTDPPAD | 0.003 |
| 1 | LSRTPTRQIS | 0.002 |
| 5 | PTRQISSIDT | 0.001 |
| 8 | QISSIDTDPP | 0.001 |
| 7 | RQISSIDTDP | 0.000 |
| 6 | TRQISSIDTD | 0.000 |
| 4 | TPTRQISSID | 0.000 |

[0958] TABLE IX

V25&26-HLA-A1-
10MERS-PSCA
Each peptide is a portion of SEQ ID
NO: 8; each start position is
specified, the length of peptide is 10
amino acids, and the end position
for each peptide is the start position
plus nine.

| | | |
|---|---|---|
| START | SUBSEQUENCE | SCORE |

| | | |
|---|---|---|
| 9 | ISSIDTDPPA | 0.030 |
| 2 | SRTPTRQISS | 0.025 |
| 3 | RTPTRQISSI | 0.025 |
| 10 | SSIDTDPPAD | 0.003 |
| 1 | LSRTPTRQIS | 0.002 |
| 5 | PTRQISSIDT | 0.001 |
| 8 | QISSIDTDPP | 0.001 |
| 9 | RQISSIDTDP | 0.000 |
| 6 | TRQISSIDTD | 0.000 |
| 4 | TPTRQISSID | 0.000 |

[0959] TABLE IX

V26-HLA-A1-10MERS-
PSCA
Each peptide is a portion of SEQ
ID NO: 8; each start position is
specified, the length of peptide is
10 amino acids, and the end
position for each peptide is the
start position plus nine.

| | | |
|---|---|---|
| START | SUBSEQUENCE | SCORE |

| | | |
|---|---|---|
| 9 | SSDTDPPADG | 1.500 |
| 1 | RTPTRQIGSS | 0.025 |
| 7 | IGSSDTDPPA | 0.005 |
| 8 | GSSDTDPPAD | 0.003 |
| 6 | QIGSSDTDPP | 0.001 |
| 3 | PTRQlGSSDT | 0.000 |
| 5 | RQIGSSDTDP | 0.000 |
| 4 | TRQIGSSDTD | 0.000 |
| 10 | SDTDPPADGP | 0.000 |
| 2 | TPTRQIGSSD | 0.000 |

[0960] TABLE IX

V27-HLA-A1-10MERS
PSCA
Each peptide is a portion of SEQ
ID NO: 8; each start position is
specified, the length of peptide is
10 amino acids, and the end
position for each peptide is the
start position plus nine.

| | | |
|---|---|---|
| START | SUBSEQUENCE | SCORE |

| | | |
|---|---|---|
| 2 | SRGQALRRAQ | 0.001 |
| 1 | PSRGQALRRA | 0.000 |

[0961] TABLE V1

HLA-A0201-9MERS-
PSCA
Each peptide is a portion of SEQ
ID NO: 2; each start position is
specified, the length of peptide is 9
amino acids, and the end position
for each peptide is the start
position plus eight.

| | | |
|---|---|---|
| START | SUBSEQUENCE | SCORE |

| | | |
|---|---|---|
| 43 | QLGEQCWTA | 152.766 |
| 5 | LLALLMAGL | 83.527 |
| 7 | ALLMAGLAL | 79.041 |
| 109 | LLPALGLLL | 36.316 |
| 105 | AILALLPAL | 24.997 |
| 108 | ALLPALGLL | 23.633 |
| 14 | ALQPGTALL | 21.362 |
| 20 | ALLCYSCKA | 18.382 |
| 115 | LLLWGPGQL | 17.4681 |
| 42 | TQLGEQCWT | 15.3751 |
| 36 | LQVENCTQL | 15.0961 |
| 99 | ALQPAAAIL | 8.759 |
| 58 | LLTVISKGC | 8.446 |
| 3 | AVLLALLMA | 3.699 |
| 30 | VSNEDCLQV | 3.165 |
| 83 | NITCCDTDL | 2.937 |
| 22 | LCYSCKAQV | 2.470 |
| 78 | YVGKKNITC | 2.000 |
| 60 | TVISKGCSL | 1.869 |
| 107 | LALLPALGL | 1.866 |
| 13 | LALQPGTAL | 1.866 |
| 4 | VLLALLMAG | 1.078 |
| 28 | AQVSNEDCL | 1.061 |
| 15 | LQPGTALLC | 0.856 |
| 100 | LQPAAAILA | 0.856 |
| 12 | GLALQPGTA | 0.646 |
| 57 | GLLTVISKG | 0.634 |
| 71 | VDDSQDYYV | 0.361 |
| 101 | QPAAAILAL | 0.321 |
| 47 | QCWTARIRA | 0.269 |
| 112 | ALGLLLWGP | 0.257 |
| 2 | KAVLLALLM | 0.242 |
| 63 | SKGCSLNCV | 0.222 |
| 8 | LLMAGLALQ | 0.216 |
| 45 | GEQCWTARI | 0.203 |
| 11 | AGLALQPGT | 0.180 |
| 104 | AAILALLPA | 0.159 |
| 92 | CNASGAHAL | 0.139 |
| 54 | RAVGLLTVI | 0.137 |
| 106 | ILALLPALG | 0.127 |
| 27 | KAQVSNEDC | 0.118 |
| 1 | MKAVLLALL | 0.116 |
| 52 | RIRAVGLLT | 0.078 |
| 95 | SGAHALQPA | 0.075 |
| 18 | GTALLCYSC | 0.069 |
| 96 | GAHALQPAA | 0.069 |
| 84 | ITCCDTDLC | 0.057 |
| 6 | LALLMAGLA | 0.056 |
| 114 | GLLLWGPGQ | 0.055 |
| 91 | LCNASGAHA | 0.055 |
| 53 | IRAVGLLTV | 0.038 |
| 81 | KKNITCCDT | 0.036 |
| 86 | CCDTDLCNA | 0.030 |
| 70 | CVDDSQDYY | 0.029 |
| 89 | TDLCNASGA | 0.026 |
| 21 | LLCYSCKAQ | 0.025 |
| 50 | TARIRAVGL | 0.023 |
| 9 | LMAGLALQP | 0.018 |
| 98 | HALQPAAAI | 0.018 |
| 61 | VISKGCSLN | 0.017 |
| 40 | NCTQLGEQC | 0.016 |
| 102 | PAAAILALL | 0.015 |
| 35 | CLQVENCTQ | 0.015 |
| 34 | DCLQVENCT | 0.013 |
| 67 | SLNCVDDSQ | 0.007 |
| 48 | CWTARIRAV | 0.004 |
| 79 | VGKKNITCC | 0.004 |
| 10 | MAGLALQPG | 0.004 |
| 97 | AHALQPAAA | 0.003 |
| 55 | AVGLLTVIS | 0.003 |
| 24 | YSCKAQVSN | 0.002 |
| 66 | CSLNCVDDS | 0.002 |
| 85 | TCCDTDLCN | 0.002 |
| 69 | NCVDDSQDY | 0.002 |
| 49 | WTARIRAVG | 0.002 |
| 77 | YYVGKKNIT | 0.002 |
| 62 | ISKGCSLNC | 0.002 |
| 110 | LPALGLLLW | 0.002 |
| 56 | VGLLTVISK | 0.001 |
| 29 | QVSNEDCLQ | 0.001 |
| 19 | TALLCYSCK | 0.001 |
| 16 | QPGTALLCY | 0.001 |
| 111 | PALGLLLWG | 0.001 |
| 41 | CTQLGEQCW | 0.001 |
| 51 | ARIRAVGLL | 0.001 |
| 90 | DLCNASGAH | 0.001 |
| 113 | LGLLLWGPG | 0.001 |
| 33 | EDCLQVENC | 0.001 |
| 32 | NEDCLQVEN | 0.001 |
| 38 | VENCTQLGE | 0.000 |
| 87 | CDTDLCNAS | 0.000 |
| 37 | QVENCTQLG | 0.000 |
| 76 | DYYVGKKNI | 0.000 |
| 75 | QDYYVGKKN | 0.000 |
| 59 | LTVISKGCS | 0.000 |
| 103 | NASGAHALQ | 0.000 |
| 93 | SQDYYVGKK | 0.000 |
| 82 | KNITCCDTD | 0.000 |
| 68 | LNCVDDSQD | 0.000 |

[0962] TABLE X

V4-HLA-A0201-9MERS-
PSCA
Each peptide is a portion of SEQ
ID NO: 8; each start position is
specified, the length of peptide is 9
amino acids, and the end position
for each peptide is the start
position plus eight.

| | | |
|---|---|---|
| START | SUBSEQUENCE | SCORE |

| | | |
|---|---|---|
| 166 | YDLSQVWSV | 28.361 |
| 146 | TLNPVLRHL | 9.827 |
| 170 | QVWSVVSPA | 8.298 |
| 94 | LTMYVCAPV | 6.076 |
| 167 | DLSQVWSVV | 3.636 |
| 65 | VVPQASVPL | 3.178 |
| 84 | LVPEAHPNA | 3.030 |
| 57 | APLQPTLGV | 1.680 |
| 160 | FPAHPIYDL | 1.475 |
| 80 | WEPVLVPEA | 1.022 |
| 35 | SLRCSLHSA | 0.868 |
| 63 | LGVVPQASV | 0.772 |
| 1 | MTHRTTTWA | 0.645 |
| 55 | WGAPLQPTL | 0.641 |
| 66 | VPQASVPLL | 0.545 |
| 70 | SVPLLTHPA | 0.435 |
| 11 | RTSRAVTPT | 0.238 |
| 32 | LPPSLRCSL | 0.237 |
| 157 | QEAFPAHPI | 0.203 |
| 58 | PLQPTLGVV | 0.188 |
| 142 | PAFSTLNPV | 0.181 |
| 92 | ASLTMYVCA | 0.180 |
| 24 | AGPMPCSRL | 0.139 |
| 73 | LLTHPAQWE | 0.139 |
| 120 | GSIDTDPPA | 0.133 |
| 139 | FHGPAFSTL | 0.130 |
| 83 | VLVPEAHPN | 0.127 |
| 53 | RLWGAPLQP | 0.124 |
| 108 | PMALSRTPT | 0.118 |
| 16 | VTPTCATPA | 0.117 |
| 14 | RAVTPTCAT | 0.104 |
| 130 | GPSNPLCCC | 0.075 |
| 62 | TLGVVPQAS | 0.075 |
| 39 | SLHSACCSG | 0.075 |
| 21 | ATPAGPMPC | 0.069 |
| 8 | WARRTSRAV | 0.068 |
| 91 | NASLTMYVC | 0.065 |
| 46 | SGDPASYRL | 0.056 |
| 102 | VPHPDPPMA | 0.055 |
| 90 | PNASLTMYV | 0.055 |
| 78 | AQWEPVLVP | 0.048 |
| 75 | THPAQWEPV | 0.040 |
| 163 | HPIYDLSQV | 0.036 |
| 93 | SLTMYVCAP | 0.034 |
| 31 | RLPPSLRCS | 0.034 |
| 154 | LFPQEAFPA | 0.034 |
| 42 | SACCSGDPA | 0.034 |
| 37 | RCSLHSACC | 0.032 |
| 138 | CFHGPAFST | 0.030 |
| 135 | LCCCFHGPA | 0.027 |
| 49 | PASYRLWGA | 0.026 |
| 77 | PAQWEPVLV | 0.021 |
| 4 | RTTTWARRT | 0.021 |
| 114 | TPTRQIGSI | 0.020 |
| 155 | FPQEAFPAH | 0.017 |
| 67 | PQASVPLLT | 0.017 |
| 110 | ALSRTPTRQ | 0.015 |
| 95 | TMYVCAPVP | 0.014 |
| 97 | YVCAPVPHP | 0.014 |
| 61 | PTLGVVPQA | 0.013 |
| 174 | VVSPAPSRG | 0.011 |
| 133 | NPLCCCFHG | 0.010 |
| 153 | HLFPQEAFP | 0.010 |
| 137 | CCFHGPAFS | 0.010 |
| 101 | PVPHPDPPM | 0.010 |
| 86 | PEAHPNASL | 0.009 |
| 145 | STLNPVLRH | 0.009 |
| 106 | DPPMALSRT | 0.008 |
| 87 | EAHPNASLT | 0.008 |
| 128 | ADGPSNPLC | 0.007 |
| 177 | PAPSRGQAL | 0.007 |
| 143 | AFSTLNPVL | 0.006 |
| 72 | PLLTHPAQW | 0.006 |
| 151 | LRHLFPQEA | 0.004 |
| 176 | SPAPSRGQA | 0.004 |
| 19 | TCATPAGPM | 0.004 |
| 54 | LWGAPLQPT | 0.004 |
| 150 | VLRHLFPQE | 0.004 |
| 169 | SQVWSVVSP | 0.003 |
| 88 | AHPNASLTM | 0.003 |
| 28 | PCSRLPPSL | 0.003 |
| 132 | SNPLCCCFH | 0.003 |
| 74 | LTHPAQWEP | 0.003 |
| 127 | PADGPSNPL | 0.003 |
| 30 | SRLPPSLRC | 0.003 |
| 12 | TSRAVTPTC | 0.002 |
| 129 | DGPSNPLCC | 0.002 |
| 68 | QASVPLLTH | 0.002 |
| 172 | WSVVSPAPS | 0.002 |
| 45 | CSGDPASYR | 0.002 |
| 118 | QK3SIDTDP | 0.002 |
| 76 | HPAQWEPVL | 0.002 |
| 27 | MPCSRLPPS | 0.002 |
| 38 | CSLHSACCS | 0.002 |
| 111 | LSRTPTRQI | 0.002 |
| 6 | TTWARRTSR | 0.002 |
| 117 | RQIGSIDTD | 0.002 |
| 149 | PVLRHLFPQ | 0.001 |
| 103 | PHPDPPMAL | 0.001 |
| 173 | SVVSPAPSR | 0.001 |

[0963] TABLE X

V19-HLA-A0201-9MERS-
PSCA
Each peptide is a portion of SEQ
ID NO: 8; each start position is
specified, the length of peptide is 9
amino acids, and the end position
for each peptide is the start
position plus eight.

| | | |
|---|---|---|
| START | SUBSEQUENCE | SCORE |

| | | |
|---|---|---|
| 8 | LLPSLRCSL | 36.316 |
| 7 | RLLPSLRCS | 0.127 |
| 1 | PAPSRGQAL | 0.007 |
| 4 | PCSRLLPSL | 0.007 |
| 6 | SRLLPSLRC | 0.003 |
| 3 | MPCSRLLPS | 0.002 |
| 9 | LPSLRCSLH | 0.001 |
| 2 | PMPCSRLLP | 0.000 |
| 5 | CSRLLPSLR | 0.000 |

[0964] TABLE X

V20-HLA-A0201-9MERS-
PSCA
Each peptide is a portion of SEQ
ID NO: 8; each start position is
specified, the length of peptide is 9
amino acids, and the end position
for each peptide is the start
position plus eight.

| | | |
|---|---|---|
| START | SUBSEQUENCE | SCORE |

| | | |
|---|---|---|
| 3 | SGDPASSRL | 0.056 |
| 6 | PASSRLWGA | 0.026 |
| 8 | SSRLWGAPL | 0.011 |
| 1 | CCSGDPASS | 0.000 |
| 2 | CSGDPASSR | 0.000 |
| 5 | DPASSRLWG | 0.000 |
| 7 | ASSRLWGAP | 0.000 |
| 4 | GDPASSRLW | 0.000 |
| 9 | SRLWGAPLQ | 0.000 |

[0965] TABLE X

V21-HLA-A0201-9MERS-
PSCA
Each peptide is a portion of SEQ
ID NO: 8; each start position is
specified, the length of peptide is 9
amino acids, and the end position
for each peptide is the start
position plus eight.

| | | |
|---|---|---|
| START | SUBSEQUENCE | SCORE |

| | | |
|---|---|---|
| 6 | LLTDPAQWE | 0.571 |
| 3 | SVPLLTDPA | 0.213 |
| 8 | TDPAQWEPV | 0.080 |
| 5 | PLLTDPAQW | 0.006 |
| 9 | DPAQWEPVL | 0.004 |
| 7 | LTDPAQWEP | 0.001 |
| 4 | VPLLTDPAQ | 0.001 |
| 1 | QASVPLLTD | 0.000 |
| 2 | ASVPLLTDP | 0.000 |

[0966] TABLE X

V21&22-HLA-A0201-
9MERS-PSCA
Each peptide is a portion of SEQ
ID NO: 8; each start position is
specified, the length of peptide is 9
amino acids, and the end position
for each peptide is the start
position plus eight.

| | | |
|---|---|---|
| START | SUBSEQUENCE | SCORE |

| | | |
|---|---|---|
| 8 | DLAQWEPVL | 0.657 |
| 5 | LLTDLAQWE | 0.571 |
| 1 | ASVPLLTDL | 0.321 |
| 7 | TDLAQWEPV | 0.298 |
| 2 | SVPLLTDLA | 0.213 |
| 4 | PLLTDLAQW | 0.014 |
| 6 | LTDLAQWEP | 0.001 |
| 3 | VPLLTDLAQ | 0.001 |

[0967] TABLE X

V22-HLA-A0201-
9MERS-PSCA
Each peptide is a portion of SEQ
ID NO: 8; each start position is
specified, the length of peptide is 9
amino acids, and the end position
for each peptide is the start
position plus eight.

| | | |
|---|---|---|
| START | SUBSEQUENCE | SCORE |

| | | |
|---|---|---|
| 9 | LAQWEPVLV | 1.642 |
| 2 | SVPLLTHLA | 0.435 |
| 1 | ASVPLLTHL | 0.321 |
| 8 | HLAQWEPVL | 0.298 |
| 7 | THLAQWEPV | 0.149 |
| 5 | LLTHLAQWE | 0.139 |
| 4 | PLLTHLAQW | 0.014 |
| 6 | LTHLAQWEP | 0.003 |
| 3 | VPLLTHLAQ | 0.001 |

[0968] TABLE X

V24-HLA-A0201-
9MERS-PSCA
Each peptide is a portion of SEQ
ID NO: 8; each start position is
specified, the length of peptide is 9
amino acids, and the end position
for each peptide is the start
position plus eight.

| | | |
|---|---|---|
| START | SUBSEQUENCE | SCORE |

| | | |
|---|---|---|
| 3 | LTMYVCTPV | 6.076 |
| 1 | ASLTMYVCT | 0.270 |
| 2 | SLTMYVCTP | 0.034 |
| 4 | TMYVCTPVP | 0.014 |
| 6 | YVCTPVPHP | 0.014 |
| 8 | CTPVPHPDP | 0.000 |
| 7 | VCTPVPHPD | 0.000 |
| 5 | MYVCTPVPH | 0.000 |

[0969] TABLE X

V22-HLA-A0201-
9MERS-PSCA
Each peptide is a portion of SEQ
ID NO: 8; each start position is
specified, the length of peptide is 9
amino acids, and the end position
for each peptide is the start
position plus eight.

| | | |
|---|---|---|
| START | SUBSEQUENCE | SCORE |

| | | |
|---|---|---|
| 3 | TPTRQISSI | 0.157 |
| 9 | SSIDTDPPA | 0.133 |
| 7 | QISSIDTDP | 0.002 |
| 6 | RQISSIDTD | 0.002 |
| 5 | TRQISSIDT | 0.001 |
| 2 | RTPTRQISS | 0.001 |
| 8 | ISSIDTDPP | 0.000 |
| 1 | SRTPTRQIS | 0.000 |
| 4 | PTRQISSID | 0.000 |

[0970] TABLE X

V25&26-HLA-A0201-
9MERS-PSCA
Each peptide is a portion of SEQ
ID NO: 8; each start position is
specified, the length of peptide is 9
amino acids, and the end position
for each peptide is the start
position plus eight.

| | | |
|---|---|---|
| START | SUBSEQUENCE | SCORE |

| | | |
|---|---|---|
| 7 | SSSDTDPPA | 0.133 |
| 5 | QISSSDTDP | 0.002 |
| 1 | TPTRQISSS | 0.001 |
| 3 | TRQISSSDT | 0.001 |
| 4 | RQISSSDTD | 0.001 |
| 6 | ISSSDTPPP | 0.000 |
| 2 | PTRQISSSD | 0.000 |

[0971] TABLE X

V26--HLA-A0201-9MERS-PSCA
Each peptide is a portion of SEQ ID NO: 8;
each start position is specified, the
length of peptide is 9 amino acids, and
the end position for each peptide is the
start position plus eight.

| | | |
|---|---|---|
| START | SUBSEQUENCE | SCORE |

| | | |
|---|---|---|
| 7 | GSSDTDPPA | 0.133 |
| 5 | QIGSSDTDP | 0.002 |
| 3 | TRQIGSSDT | 0.001 |
| 4 | RQIGSSDTD | 0.001 |
| 9 | SDTDPPADG | 0.000 |
| 1 | TPTRQIGSS | 0.000 |
| 6 | IGSSDTDPP | 0.000 |
| 8 | SSDTDPPAD | 0.000 |
| 2 | PTRQIGSSD | 0.000 |

[0972] TABLE X

V27-HLA-A0201-9MERS-PSCA
Each peptide is a portion of SEQ ID NO: 8;
each start position is specified, the
length of peptide is 9 amino acids, and
the end position for each peptide is the
start position plus eight.

| | | |
|---|---|---|
| START | SUBSEQUENCE | SCORE |

| | | |
|---|---|---|
| 1 | SRGQALRRA | 0.000 |
| 2 | RGQALRRAQ | 0.000 |

[0973] TABLE XI

V1-HLA-A0201-
10MERS-PSCA
Each peptide is a portion of SEQ
ID NO: 2; each start position is
specified, the length of peptide is
10 amino acids, and the end
position for each peptide is the
start position plus nine.

| | | |
|---|---|---|
| START | SUBSEQUENCE | SCORE |

| | | |
|---|---|---|
| 4 | VLLALLMAGL | 309.050 |
| 21 | LLCYSCKAQV | 118.238 |
| 108 | ALLPALGLLL | 79.041 |
| 70 | CVDDSQDYYV | 54.894 |
| 106 | ILALLPALGL | 36.316 |
| 35 | CLQVENCTQL | 21.362 |
| 12 | GLALQPGTAL | 21.362 |
| 57 | GLLTVISKGC | 18.382 |
| 42 | TQLGEQCWTA | 13.978 |
| 114 | GLLLWGPGQL | 10.275 |
| 100 | LQPAAAILAL | 8.469 |
| 29 | QVSNEDCLQV | 6.086 |
| 99 | ALQPAAAILA | 4.968 |
| 14 | ALQPGTALLC | 4.968 |
| 78 | YVGKKNITCC | 4.599 |
| 6 | LALLMAGLAL | 1.866 |
| 13 | LALQPGTALL | 1.866 |
| 47 | QCWTARIRAV | 1.733 |
| 52 | RIRAVGLLTV | 1.672 |
| 49 | WTARIRAVGL | 1.365 |
| 61 | VISKGCSLNC | 1.161 |
| 5 | LLALLMAGLA | 1.098 |
| 104 | AAILALLPAL | 0.682 |
| 41 | CTQLGEQCWT | 0.569 |
| 107 | LALLPALGLL | 0.588 |
| 2 | KAVLLALLMA | 0.555 |
| 27 | KAQVSNEDCL | 0.509 |
| 59 | LTVISKGCSL | 0.504 |
| 82 | KNITCCDTDL | 0.488 |
| 90 | DLCNASGAHA | 0.373 |
| 83 | NITCCDTDLC | 0.335 |
| 101 | QPAAAILALL | 0.321 |
| 85 | TCCDTDLCNA | 0.306 |
| 109 | LLPALGLLLW | 0.291 |
| 19 | TALLCYSCKA | 0.255 |
| 91 | LCNASGAHAL | 0.237 |
| 9 | LMAGLALQPG | 0.210 |
| 10 | MAGLALQPGT | 0.176 |
| 103 | AAAILALLPA | 0.159 |
| 7 | ALLMAGLALQ | 0.127 |
| 43 | QLGEQCWTAR | 0.104 |
| 8 | LLMAGLALQP | 0.094 |
| 94 | ASGAHALQPA | 0.075 |
| 96 | GAHALQPAAA | 0.069 |
| 62 | ISKGCSLNCV | 0.062 |
| 3 | AVLLALLMAG | 0.055 |
| 20 | ALLCYSCKAQ | 0.055 |
| 36 | LQVENCTQLG | 0.053 |
| 75 | QDYYVGKKNI | 0.046 |
| 32 | NEDCLQVENC | 0.044 |
| 105 | AILALLPALG | 0.038 |
| 46 | EQCWTARIRA | 0.038 |
| 95 | SGAHALQPAA | 0.032 |
| 15 | LQPGTALLCY | 0.030 |
| 112 | ALGLLLWGPG | 0.016 |
| 58 | LLTVISKGCS | 0.016 |
| 11 | AGLALQPGTA | 0.016 |
| 98 | HALQPAAAIL | 0.015 |
| 67 | SLNCVDDSQD | 0.015 |
| 1 | MKAVLLALLM | 0.012 |
| 110 | LPALGLLLWG | 0.010 |
| 44 | LGEQCWTARI | 0.007 |
| 97 | AHALQPAAAI | 0.007 |
| 56 | VGLLTVISKG | 0.007 |
| 50 | TARIRAVGLL | 0.007 |
| 60 | TVISKGCSLN | 0.007 |
| 16 | QPGTALLCYS | 0.006 |
| 69 | NCVDDSQDYY | 0.005 |
| 26 | CKAQVSNEDC | 0.003 |
| 77 | YYVGKKNITC | 0.003 |
| 74 | SQDYYVGKKN | 0.003 |
| 55 | AVGLLTVISK | 0.003 |
| 53 | IRAVGLLTVI | 0.002 |
| 88 | DTDLCNASGA | 0.002 |
| 84 | ITCCDTDLCN | 0.002 |
| 28 | AQVSNEDCLQ | 0.002 |
| 39 | ENCTQLGEQC | 0.001 |
| 22 | LCYSCKAQVS | 0.001 |
| 51 | ARIRAVGLLT | 0.001 |
| 24 | YSCKAQNSNE | 0.001 |
| 68 | LNCVDDSQDY | 0.001 |
| 33 | EDCLQVENCT | 0.001 |
| 17 | PGTALLCYSC | 0.001 |
| 30 | VSNEDCLQVE | 0.001 |
| 113 | LGLLLWGPGQ | 0.001 |
| 65 | GCSLNCVDDS | 0.001 |
| 40 | NCTQLGEQCW | 0.000 |
| 54 | RAVGLLTVIS | 0.000 |
| 87 | CDTDLCNASG | 0.000 |
| 80 | GKKNITCCDT | 0.000 |
| 64 | KGCSLNCVDD | 0.000 |
| 18 | GTALLCYSCK | 0.000 |
| 111 | PALGLLLWGP | 0.000 |
| 93 | NASGAHALQP | 0.000 |
| 86 | CCDTDLCNAS | 0.000 |
| 66 | CSLNCVDDSQ | 0.000 |
| 38 | VENCTQLGEQ | 0.000 |
| 31 | SNEDCLQVEN | 0.000 |
| 76 | DYYVGKKNIT | 0.000 |
| 92 | CNASGAHALQ | 0.000 |

[0974] TABLE XI

V4-HLA-A0201-10MERS-PSCA
Each peptide is a portion of SEQ ID NO: 8;
each start position is specified, the
length of peptide is 10 amino acids, and
the end position for each peptide is the
start position plus nine.

| | | |
|---|---|---|
| START | SUBSEQUENCE | SCORE |

| | | |
|---|---|---|
| 53 | RLWGAPLQPT | 142.259 |
| 62 | TLGVVPQASV | 69.552 |
| 93 | SLTMYVCAPV | 69.552 |
| 31 | RLPPSLRCSL | 21.362 |
| 83 | VLVPEAHPNA | 8.446 |
| 65 | VVPQASVPLL | 7.309 |
| 153 | HLFPQEAFPA | 3.625 |
| 150 | VLRHLFPQEA | 2.439 |
| 110 | ALSRTPTRQI | 2.087 |
| 64 | GVVPQASVPL | 1.869 |
| 74 | LTHPAQWEPV | 1.368 |
| 169 | SQVWSVVSPA | 1.159 |
| 166 | YDLSQVWSVV | 1.146 |
| 141 | GPAFSTLNPV | 1.044 |
| 137 | CCFHGPAFST | 1.044 |
| 56 | GAPLQPTLGV | 0.966 |
| 6 | TTWARRTSRA | 0.573 |
| 45 | CSGDPASYRL | 0.572 |
| 145 | STLNPVLRHL | 0.505 |
| 50 | ASYRLWGAPL | 0.446 |
| 15 | AVTPTCATPA | 0.435 |
| 35 | SLRCSLHSAC | 0.378 |
| 27 | MPCSRLPPSL | 0.237 |
| 102 | VPHPDPPMAL | 0.237 |
| 57 | APLQPTLGVV | 0.206 |
| 73 | LLTHPAQWEP | 0.190 |
| 95 | TMYVCAPVPH | 0.172 |
| 176 | SPAPSRGQAL | 0.139 |
| 78 | AQWEPVLVPE | 0.118 |
| 165 | IYDLSQVWSV | 0.113 |
| 162 | AHPIYDLSQV | 0.111 |
| 91 | NASLTMYVCA | 0.104 |
| 89 | HPNASLTMYV | 0.085 |
| 66 | VPQASVPLLT | 0.083 |
| 60 | QPTLGVVPQA | 0.075 |
| 146 | TLNPVLRHLF | 0.075 |
| 20 | CATPAGPMPC | 0.069 |
| 11 | RTSRAVTPTC | 0.069 |
| 119 | IGSIDTDPPA | 0.055 |
| 134 | PLCCCFHGPA | 0.054 |
| 84 | LVPEAHPNAS | 0.045 |
| 113 | RTPTRQIGSI | 0.043 |
| 48 | DPASYRLWGA | 0.042 |
| 159 | AFPAHPIYDL | 0.034 |
| 69 | ASVPLLTHPA | 0.032 |
| 100 | APVPHPDPPM | 0.032 |
| 138 | CFHGPAFSTL | 0.028 |
| 164 | PIYDLSQVWS | 0.016 |
| 76 | HPAQWEPVLV | 0.015 |
| 85 | VPEAHPNASL | 0.015 |
| 39 | SLHSACCSGD | 0.015 |
| 8 | WARRTSRAVT | 0.015 |
| 126 | PPADGPSNPL | 0.013 |
| 170 | QVWSVVSPAP | 0.011 |
| 142 | PAFSTLNPVL | 0.010 |
| 101 | PVPHPDPPMA | 0.010 |
| 175 | VSPAPSRGQA | 0.007 |
| 155 | FPQEAFPAHP | 0.007 |
| 128 | ADGPSNPLCC | 0.007 |
| 72 | PLLTHPAQWE | 0.007 |
| 23 | PAGPMPCSRL | 0.007 |
| 173 | SVVSPAPSRG | 0.007 |
| 75 | THPAQWEPVL | 0.006 |
| 34 | PSLRCSLHSA | 0.006 |
| 97 | YVCAPVPHPD | 0.006 |
| 59 | LQPTLGVVPQ | 0.006 |
| 129 | DGPSNPLCCC | 0.006 |
| 87 | EAHPNASLTM | 0.005 |
| 144 | FSTLNPVLRH | 0.005 |
| 54 | LWGAPLQPTL | 0.005 |
| 121 | SIDTDPPADG | 0.004 |
| 107 | PPMALSRTPT | 0.004 |
| 80 | WEPVLVPEAH | 0.003 |
| 86 | PEAHPNASLT | 0.003 |
| 71 | VPLLTHPAQW | 0.003 |
| 132 | SNPLCCCFHG | 0.003 |
| 26 | PMPCSRLPPS | 0.003 |
| 136 | CCCFHGPAFS | 0.003 |
| 1 | MTHRTTTWAR | 0.003 |
| 12 | TSRAVTPTCA | 0.002 |
| 29 | CSRLPPSLRC | 0.002 |
| 10 | RRTSRAVTPT | 0.002 |
| 21 | ATPAGPMPCS | 0.002 |
| 167 | DLSQVWSVVS | 0.002 |
| 55 | WGAPLQPTLG | 0.002 |
| 7 | TWARRTSRAV | 0.002 |
| 38 | CSLHSACCSG | 0.002 |
| 16 | VTPTCATPAG | 0.002 |
| 160 | FPAHPIYDLS | 0.002 |
| 117 | RQIGSIDTDP | 0.002 |
| 156 | PQEAFPAHPI | 0.001 |
| 70 | SVPLLTHPAQ | 0.001 |
| 109 | MALSRTPTRQ | 0.001 |
| 148 | NPVLRHLFPQ | 0.001 |
| 36 | LRCSLHSACC | 0.001 |
| 13 | SRAVTPTCAT | 0.001 |
| 42 | SACCSGDPAS | 0.001 |
| 118 | QIGSIDTDPP | 0.001 |
| 147 | LNPVLRHLFP | 0.001 |
| 139 | FHGPAFSTLN | 0.001 |

[0975] TABLE XI

V19-HLA-A0201-10MERS-PSCA
Each peptide is a portion of SEQ ID NO: 8;
each start position is specified, the
length of peptide is 10 amino acids, and
the end position for each peptide is the
start position plus nine.

| | | |
|---|---|---|
| START | SUBSEQUENCE | SCORE |

| | | |
|---|---|---|
| 8 | RLLPSLRCSL | 79.041 |
| 4 | MPCSRLLPSL | 0.545 |
| 9 | LLPSLRCSLH | 0.127 |
| 1 | AGPMPCSRLL | 0.028 |
| 3 | PMPCSRLLPS | 0.003 |
| 6 | CSRLLPSLRC | 0.002 |
| 10 | LPSLRCSLHS | 0.001 |
| 2 | GPMPCSRLLP | 0.000 |
| 7 | SRLLPSLRCS | 0.000 |
| 5 | PCSRLLPSLR | 0.000 |

[0976] TABLE XI

V20-HLA-A0201-10MERS-PSCA
Each peptide is a portion of SEQ ID NO: 8;
each start position is specified, the
length of peptide is 10 amino acids, and
the end position for each peptide is the
start position plus nine.

| | | |
|---|---|---|
| START | SUBSEQUENCE | SCORE |

| | | |
|---|---|---|
| 3 | CSGDPASSRL | 0.572 |
| 8 | ASSRLWGAPL | 0.139 |
| 6 | DPASSRLWGA | 0.042 |
| 5 | GDPASSRLWG | 0.001 |
| 1 | ACCSGDPASS | 0.000 |
| 2 | CCSGDPASSR | 0.000 |
| 4 | SGDPASSRLW | 0.000 |
| 10 | SRLWGAPLQP | 0.000 |
| 9 | SSRLWGAPLQ | 0.000 |
| 7 | PASSRLWGAP | 0.000 |

[0977] TABLE XI

V21-HLA-A0201-10MERS-PSCA
Each peptide is a portion of SEQ ID NO: 8;
each start position is specified, the
length of peptide is 10 amino acids, and
the end position for each peptide is the
start position plus nine.

| | | |
|---|---|---|
| START | SUBSEQUENCE | SCORE |

| | | |
|---|---|---|
| 7 | LLTDPAQWEP | 0.779 |
| 8 | LTDPAQWEPV | 0.547 |
| 10 | DPAQWEPVLV | 0.034 |
| 3 | ASVPLLTDPA | 0.016 |
| 9 | TDPAQWEPVL | 0.012 |
| 6 | PLLTDPAQWE | 0.007 |
| 5 | VPLLTDPAQW | 0.003 |
| 4 | SVPLLTDPAQ | 0.001 |
| 2 | QASVPLLTDP | 0.000 |
| 1 | PQASVPLLTD | 0.000 |

[0978] TABLE XI

V21 & 22 -HLA-A0201-10MERS-PSCA
Each peptide is a portion of SEQ ID NO: 8;
each start position is specified, the
length of peptide is 10 amino acids, and
the end position for each peptide is the
start position plus nine.

| | | |
|---|---|---|
| START | SUBSEQUENCE | SCORE |

| | | |
|---|---|---|
| 9 | DLAQWEPVLV | 5.216 |
| 6 | LLTDLAQWEP | 0.779 |
| 1 | QASVPLLTDL | 0.682 |
| 7 | LTDLAQWEPV | 0.547 |
| 8 | TDLAQWEPVL | 0.045 |
| 2 | ASVPLLTDLA | 0.016 |
| 4 | VPLLTDLAQW | 0.007 |
| 5 | PLLTDLAQWE | 0.007 |
| 3 | SVPLLTDLAQ | 0.001 |

[0979] TABLE XI

V22-HLA-A0201-10MERS-PSCA
Each peptide is a portion of SEQ ID NO: 8;
each start position is specified, the
length of peptide is 10 amino acids, and
the end position for each peptide is the
start position plus nine.

| | | |
|---|---|---|
| START | SUBSEQUENCE | SCORE |

| | | |
|---|---|---|
| 9 | HLAQWEPVLV | 2.365 |
| 7 | LTHLAQWEPV | 1.368 |
| 1 | QASVPLLTHL | 0.682 |
| 6 | LLTHLAQWEP | 0.190 |
| 2 | ASVPLLTHLA | 0.032 |
| 8 | THLAWWEPVL | 0.023 |
| 4 | VPLLTHLAQW | 0.007 |
| 5 | PLLTHLAQWE | 0.007 |
| 3 | SVPLLTHLAQ | 0.001 |
| 10 | LAQWEPVLVP | 0.000 |

[0980] TABLE XI

V24-HLA-A0201-10MERS-PSCA
Each peptide is a portion of SEQ ID NO: 8;
each start position is specified, the
length of peptide is 10 amino acids, and
the end position for each peptide is the
start position plus nine.

| | | |
|---|---|---|
| START | SUBSEQUENCE | SCORE |

| | | |
|---|---|---|
| 3 | SLTMYVCTPV | 69.552 |
| 5 | TMYVCTPVPH | 0.172 |
| 1 | NASLTMYVCT | 0.155 |
| 10 | TPVPHPDPPM | 0.032 |
| 7 | YVCTPVPHPD | 0.006 |
| 2 | ASLTMYVCTP | 0.001 |
| 4 | LTMYVCTPVP | 0.001 |
| 8 | VCTPVPHPDP | 0.000 |
| 9 | CTPVPHPDPP | 0.000 |
| 6 | MYVCTPVPHP | 0.000 |

[0981] TABLE XI

V25-HLA-A0201-10MERS-PSCA
Each peptide is a portion of SEQ ID NO: 8;
each start position is specified, the
length of peptide is 10 amino acids, and
the end position for each peptide is the
start position plus nine.

| | | |
|---|---|---|
| START | SUBSEQUENCE | SCORE |

| | | |
|---|---|---|
| 3 | RTPTRQISSI | 0.333 |
| 9 | ISSIDTDPPA | 0.055 |
| 7 | RQISSIDTDP | 0.002 |
| 8 | QISSIDTDPP | 0.001 |
| 10 | SSIDTDPPAD | 0.000 |
| 5 | PTRQISSIDT | 0.000 |
| 4 | TRTRQISSID | 0.000 |
| 1 | LSRTPTRQIS | 0.000 |
| 2 | SRTPTRQISS | 0.000 |
| 6 | TRQISSIDTD | 0.000 |

[0982] TABLE X

V25 & 26--HLA-A0201-10MERS-PSCA
Each peptide is a portion of SEQ ID NO: 8;
each start position is specified, the
length of peptide is 10 amino acids, and
the end position for each peptide is the
start position plus nine.

| | | |
|---|---|---|
| START | SUBSEQUENCE | SCORE |

| | | |
|---|---|---|
| 7 | ISSSDTDPPA | 0.055 |
| 1 | RTPTRQISSS | 0.002 |
| 5 | RQISSSDTDP | 0.002 |
| 6 | QISSSDTDPP | 0.001 |
| 8 | SSSDTDPPAD | 0.000 |
| 3 | PTRQISSSDT | 0.000 |
| 2 | TRTRQISSSD | 0.000 |
| 4 | TRQISSSDTD | 0.000 |

[0983] TABLE X

V26--HLA-A0201-10MERS-PSCA
Each peptide is a portion of SEQ ID NO: 8;
each start position is specified, the
length of peptide is 10 amino acids, and
the end position for each peptide is the
start position plus nine.

| | | |
|---|---|---|
| START | SUBSEQUENCE | SCORE |

| | | |
|---|---|---|
| 7 | IGSSDTDPPA | 0.055 |
| 5 | RQIGSSDTDP | 0.002 |
| 6 | QIGSSDTDPP | 0.001 |
| 8 | GSSDTDPPAD | 0.000 |
| 1 | RTPTRQIGSS | 0.000 |
| 9 | SSDTDPPADG | 0.000 |
| 3 | PTRQIGSSDT | 0.000 |
| 2 | TRTRQIGSSD | 0.000 |
| 10 | SDTDPPADGP | 0.000 |
| 4 | TRQIGSSDTD | 0.000 |

[0984] TABLE X

V27-HLA-A0201-10MERS-PSCA
Each peptide is a portion of SEQ ID NO: 8;
each start position is specified, the
length of peptide is 10 amino acids, and
the end position for each peptide is the
start position plus nine.

| | | |
|---|---|---|
| START | SUBSEQUENCE | SCORE |

| | | |
|---|---|---|
| 1 | PSRGQALRRA | 0.000 |
| 2 | SRGQALRRAQ | 0.000 |

[0985] TABLE XII

V1-HLA-A3-9MERS-PSCA
Each peptide is a portion of SEQ ID NO: 2;
each start position is specified, the
length of peptide is 9 amino acids, and
the end position for each peptide is the
start position plus eight.

| | | |
|---|---|---|
| START | SUBSEQUENCE | SCORE |

| | | |
|---|---|---|
| 7 | ALLMAGLAL | 1.800 |
| 74 | SQDYYVGKK | 1.620 |
| 109 | LLPALGLLL | 1.200 |
| 5 | LLALLMAGL | 0.900 |
| 99 | ALQPAAAIL | 0.900 |
| 14 | ALQPGTALL | 0.900 |
| 43 | QLGEQCWTA | 0.900 |
| 20 | ALLCYSCKA | 0.900 |
| 108 | ALLPALGLL | 0.608 |
| 70 | CVDDSQDYY | 0.400 |
| 19 | TALLCYSCK | 0.300 |
| 115 | LLLWGPGQL | 0.270 |
| 114 | GLLLWGPGQ | 0.270 |
| 57 | GLLTVISKG | 0.203 |
| 56 | VGLLTVISK | 0.180 |
| 12 | GLALQPGTA | 0.180 |
| 58 | LLTVISKGC | 0.150 |
| 105 | AILALLPAL | 0.135 |
| 16 | QPGTALLCY | 0.120 |
| 112 | ALGLLLWGP | 0.090 |
| 4 | VLLALLMAG | 0.090 |
| 3 | AVLLALLMA | 0.090 |
| 60 | TVISKGCSL | 0.090 |
| 18 | GTALLCYSC | 0.090 |
| 73 | DSQDYYVGK | 0.090 |
| 83 | NITCCDTDL | 0.060 |
| 69 | NCVDDSQDY | 0.060 |
| 9 | LMAGLALQP | 0.060 |
| 8 | LLMAGLALQ | 0.045 |
| 36 | LQVENCTQL | 0.041 |
| 78 | YVGKKNITC | 0.040 |
| 52 | RIRAVGLLT | 0.030 |
| 67 | SLNCVDDSQ | 0.030 |
| 107 | LALLPALGL | 0.027 |
| 28 | AQVSNEDCL | 0.027 |
| 54 | RAVGLLTVI | 0.020 |
| 35 | CLQVENCTQ | 0.020 |
| 47 | QCWTARIRA | 0.020 |
| 106 | ILALLPALG | 0.020 |
| 101 | QPAAAILAL | 0.018 |
| 15 | LQPGTALLC | 0.018 |
| 2 | KAVLLALLM | 0.018 |
| 90 | DLCNASGAH | 0.018 |
| 45 | GEQCWTARI | 0.016 |
| 13 | LALQPGTAL | 0.013 |
| 98 | HALQPAAAI | 0.013 |
| 100 | LQPAAAILA | 0.012 |
| 41 | CTQLGEQCW | 0.010 |
| 84 | ITCCDTDLC | 0.010 |
| 21 | LLCYSCKAQ | 0.010 |
| 22 | LCYSCKAQV | 0.010 |
| 104 | AAILALLPA | 0.009 |
| 42 | TQLGEQCWT | 0.007 |
| 110 | LPALGLLLW | 0.006 |
| 96 | GAHALQPAA | 0.006 |
| 27 | KAQVSNEDC | 0.006 |
| 50 | TARIRAVGL | 0.006 |
| 55 | AVGLLTVIS | 0.004 |
| 44 | LGEQCWTAR | 0.004 |
| 46 | EQCWTARIR | 0.004 |
| 30 | VSNEDCLQV | 0.003 |
| 62 | ISKGCSLNC | 0.003 |
| 86 | CCDTDLCNA | 0.003 |
| 40 | NCQLGEQC | 0.002 |
| 37 | QVENCTQLG | 0.002 |
| 61 | VISKGCSLN | 0.002 |
| 91 | LCNASGAHA | 0.002 |
| 29 | QVSNEDCLQ | 0.002 |
| 49 | WTARIRAVG | 0.002 |
| 102 | PAAAILALL | 0.001 |
| 92 | CNASGAHAL | 0.001 |
| 1 | MKAVLLALL | 0.001 |
| 59 | LTVISKGCS | 0.001 |
| 66 | CSLNCVDDS | 0.001 |
| 6 | LALLMAGLA | 0.001 |
| 51 | ARIRAVGLL | 0.001 |
| 34 | DCLQVENCT | 0.001 |
| 25 | SCKAQVSNE | 0.001 |
| 71 | VDDSQDYYV | 0.001 |
| 53 | IRAVGLLTV | 0.001 |
| 65 | GCSLNCVDD | 0.001 |
| 76 | DYYVGKKNI | 0.000 |
| 103 | AAAILALLP | 0.000 |
| 85 | TCCDTDLCN | 0.000 |
| 93 | NASGAHALQ | 0.000 |
| 10 | MAGLALQPG | 0.000 |
| 79 | VGKKNITCC | 0.000 |
| 81 | KKNITCCDT | 0.000 |
| 63 | SKGCSLNCV | 0.000 |
| 89 | TDLCNASGA | 0.000 |
| 88 | DTDLCNASG | 0.000 |
| 95 | SGAHALQPA | 0.000 |
| 77 | YYVGKKNIT | 0.000 |
| 97 | AHALQPAAA | 0.000 |
| 94 | ASGAHALQP | 0.000 |
| 82 | KNITCCDTD | 0.000 |
| 33 | EDCLQVENC | 0.000 |
| 11 | AGLALQPGT | 0.000 |
| 111 | PALGLLLWG | 0.000 |
| 38 | VENCTQLGE | 0.000 |

[0986] TABLE XII

V4-HLA-A3-9MERS-PSCA
Each peptide is a portion of SEQ ID NO: 8;
each start position is specified, the
length of peptide is 9 amino acids, and
the end position for each peptide is the
start position plus eight.

| | | |
|---|---|---|
| START | SUBSEQUENCE | SCORE |

| | | |
|---|---|---|
| 6 | TTWARRTSR | 1.000 |
| 173 | SVVPAPSR | 0.900 |
| 170 | QVWSVVSPA | 0.450 |
| 53 | RLWGAPLQP | 0.300 |
| 35 | SLRCSLHSA | 0.300 |
| 146 | TLNPVLRHL | 0.203 |
| 93 | SLTMYVCAP | 0.180 |
| 153 | HLFPQEAFP | 0.150 |
| 145 | STLNPVLRH | 0.135 |
| 95 | TMYVCAPVP | 0.100 |
| 158 | EAFPAHPIY | 0.090 |
| 167 | DLSQVWSVV | 0.090 |
| 44 | CCSGDPASY | 0.060 |
| 150 | VLRHLFPQE | 0.060 |
| 89 | HPNASLTMY | 0.060 |
| 65 | VVPQASVPL | 0.060 |
| 62 | TLGVVPQAS | 0.060 |
| 109 | MALSRTPTR | 0.060 |
| 83 | VLVPEAHPN | 0.045 |
| 78 | AQWEPVLVP | 0.041 |
| 160 | FPAHPIYDL | 0.041 |
| 178 | APSRGQALR | 0.040 |
| 29 | CSRLPPSLR | 0.030 |
| 84 | LVPEAHPNA | 0.030 |
| 72 | PLLTHPAQW | 0.030 |
| 45 | CSGDPASYR | 0.030 |
| 73 | LLTHPAQWE | 0.030 |
| 94 | LTMYVCAPV | 0.022 |
| 144 | FSTLNPVLR | 0.020 |
| 39 | SLHSACCSG | 0.020 |
| 70 | SVPLLTHPA | 0.020 |
| 21 | ATPAGPMPC | 0.020 |
| 110 | ALSRTPTRQ | 0.020 |
| 136 | CCCFHGPAF | 0.020 |
| 66 | VPQASVPLL | 0.018 |
| 76 | HPAQWEPVL | 0.018 |
| 11 | RTSRAVTPT | 0.015 |
| 64 | GVVPQASVP | 0.013 |
| 130 | GPSNPLCCC | 0.013 |
| 58 | PLQPTLGVV | 0.013 |
| 2 | THRTTTWAR | 0.012 |
| 61 | PTLGVVPQA | 0.010 |
| 164 | PIYDLSQVW | 0.010 |
| 16 | VTPTCATPA | 0.010 |
| 108 | PMALSRTPT | 0.010 |
| 1 | MTHRTTTWA | 0.010 |
| 91 | NASLTMYVC | 0.009 |
| 155 | FPQEAFPAH | 0.009 |
| 57 | APLQPTLGV | 0.009 |
| 97 | YVCAPVPHP | 0.009 |
| 68 | QASVPLLTH | 0.009 |
| 31 | RLPPSLRCS | 0.009 |
| 23 | PAGPMPCSR | 0.006 |
| 179 | PSRGQALRR | 0.006 |
| 134 | PLCCCFHGP | 0.006 |
| 32 | LPPSLRCSL | 0.006 |
| 152 | RHLFPQEAF | 0.005 |
| 120 | GSIDTDPPA | 0.005 |
| 163 | HPIYDLSQV | 0.005 |
| 74 | LTHPAQWEP | 0.005 |
| 147 | LNPVLRHLF | 0.004 |
| 113 | RTPTRQIGS | 0.004 |
| 3 | HRTTTWARR | 0.004 |
| 26 | PMPCSRLPP | 0.004 |
| 101 | PVPHPDPPM | 0.003 |
| 174 | WSPAPSRG | 0.003 |
| 118 | QIGSIDTDP | 0.003 |
| 15 | AVTPTCATP | 0.003 |
| 102 | VPHPDPPMA | 0.003 |
| 46 | SGDPASYRL | 0.003 |
| 139 | FHGPAFSTL | 0.003 |
| 166 | YDLSQVWSV | 0.003 |
| 169 | SQVWSVVSP | 0.003 |
| 114 | TPTRQIGSI | 0.003 |
| 157 | QEAFPAHPI | 0.003 |
| 14 | RAVTPTCAT | 0.002 |
| 117 | RQIGSIDTD | 0.002 |
| 37 | RCSLHSACC | 0.002 |
| 121 | SIDTDPPAD | 0.002 |
| 42 | SACCSGDPA | 0.002 |
| 137 | CCFHGPAFS | 0.002 |
| 51 | SYRLWGAPL | 0.002 |
| 135 | LCCCFHGPA | 0.002 |
| 80 | WEPVLVPEA | 0.002 |
| 131 | PSNPLCCCF | 0.002 |
| 4 | RTTTWARRT | 0.002 |
| 142 | PAFSTLNPV | 0.002 |
| 92 | ASLTMYVCA | 0.002 |
| 12 | TSRAVTPTC | 0.002 |
| 22 | TPAGPMPCS | 0.001 |
| 104 | HPDPPMALS | 0.001 |
| 30 | SRLPPSLRC | 0.001 |
| 149 | PVLRHLFPQ | 0.001 |
| 127 | PADGPSNPL | 0.001 |
| 81 | EPVLVPEAH | 0.001 |
| 141 | GPAFSTLNP | 0.001 |
| 105 | PDPPMALSR | 0.001 |
| 49 | PASYRLWGA | 0.001 |
| 55 | WGAPLQPTL | 0.001 |
| 24 | AGPMPCSRL | 0.001 |

[0987] TABLE XII

V19-A3-9MERS-PSCA
Each peptide is a portion of SEQ ID NO: 8;
each start position is specified, the
length of peptide is 9 amino acids, and
the end position for each peptide is the
start position plus eight.

| | | |
|---|---|---|
| START | SUBSEQUENCE | SCORE |

| | | |
|---|---|---|
| 8 | LLPSLRCSL | 0.600 |
| 5 | CSRLLPSLR | 0.020 |
| 7 | RLLPSLRCS | 0.013 |
| 1 | GPMPCSRLL | 0.004 |
| 2 | PMPCSRLLP | 0.004 |
| 9 | LPSLRCSLH | 0.002 |
| 3 | MPCSRLLPS | 0.001 |
| 4 | PCSRLLPSL | 0.001 |
| 6 | SRLLPSLRC | 0.001 |

[0988] TABLE XII

V20-HLA-A3-9MERS-PSCA
Each peptide is a portion of SEQ ID NO: 8;
each start position is specified, the
length of peptide is 9 amino acids, and
the end position for each peptide is the
start position plus eight.

| | | |
|---|---|---|
| START | SUBSEQUENCE | SCORE |

| | | |
|---|---|---|
| 2 | CSGDPASSR | 0.030 |
| 8 | SSRLWGAPL | 0.009 |
| 3 | SGDPASSRL | 0.001 |
| 6 | PASSRLWGA | 0.001 |
| 1 | CCSGDPASS | 0.001 |
| 5 | DPASSRLWG | 0.000 |
| 4 | GDPASSRLW | 0.000 |
| 9 | SRLWGAPLQ | 0.000 |
| 7 | ASSRLWGAP | 0.000 |

[0989] TABLE XII

V21-HLA-A3-9MERS-PSCA
Each peptide is a portion of SEQ ID NO: 8;
each start position is specified, the
length of peptide is 9 amino acids, and
the end position for each peptide is the
start position plus eight.

| | | |
|---|---|---|
| START | SUBSEQUENCE | SCORE |

| | | |
|---|---|---|
| 5 | PLLTDPAQW | 0.030 |
| 6 | LLTDPAQWE | 0.030 |
| 3 | SVPLLTDPA | 0.020 |
| 9 | DPAQWEPVL | 0.005 |
| 7 | LTDPAQWEP | 0.005 |
| 1 | QASVPLLTD | 0.001 |
| 2 | ASVPLLTDP | 0.000 |
| 4 | VPLLTDPAQ | 0.000 |
| 8 | TDPAQWEPV | 0.000 |

[0990] TABLE XII

V21 & 22-HLA-A3-9MERS-PSCA
Each peptide is a portion of SEQ ID NO: 8;
each start position is specified, the
length of peptide is 9 amino acids, and
the end position for each peptide is the
start position plus eight.

| | | |
|---|---|---|
| START | SUBSEQUENCE | SCORE |

| | | |
|---|---|---|
| 8 | DLAQWEPVL | 0.540 |
| 4 | PLLTDLAQW | 0.045 |
| 5 | LLTDLAQWE | 0.020 |
| 2 | SVPLLTDLA | 0.020 |
| 1 | ASVPLLTDL | 0.010 |
| 6 | LTDLAQWEP | 0.003 |
| 3 | VPLLTDLAQ | 0.001 |
| 7 | TDLAQWEPV | 0.000 |

[0991] TABLE XII

V22-HLA-A3-9MERS-PSCA
Each peptide is a portion of SEQ ID NO: 8;
each start position is specified, the
length of peptide is 9 amino acids, and
the end position for each peptide is the
start position plus eight.

| | | |
|---|---|---|
| START | SUBSEQUENCE | SCORE |

| | | |
|---|---|---|
| 8 | HLAQWEPVL | 1.800 |
| 4 | PLLTHLAQW | 0.045 |
| 5 | LLTHLAQWE | 0.020 |
| 2 | SVPLLTHLA | 0.020 |
| 1 | ASVPLLTHL | 0.010 |
| 6 | LTHLAQWEP | 0.003 |
| 9 | LAQWEPVLV | 0.002 |
| 3 | VPLLTHLAQ | 0.001 |
| 7 | THLAQWEPV | 0.000 |

[0992] TABLE XII

V24-HLA-A3-9MERS-PSCA
Each peptide is a portion of SEQ ID NO: 8;
each start position is specified, the
length of peptide is 9 amino acids, and
the end position for each peptide is the
start position plus eight.

| | | |
|---|---|---|
| START | SUBSEQUENCE | SCORE |

| | | |
|---|---|---|
| 2 | SLTMYVCTP | 0.180 |
| 4 | TMYVCTPVP | 0.100 |
| 3 | LTMYVCTPV | 0.022 |
| 6 | YVCTPVPHP | 0.009 |
| 8 | CTPVPHPDP | 0.002 |
| 1 | ASLTMYVCT | 0.001 |
| 7 | VCTPVPHPD | 0.000 |
| 5 | MYVCTPVPH | 0.000 |

[0993] TABLE XII

V24-HLA-A3-9MERS-PSCA
Each peptide is a portion of SEQ ID NO: 8;
each start position is specified, the
length of peptide is 9 amino acids, and
the end position for each peptide is the
start position plus eight.

| | | |
|---|---|---|
| START | SUBSEQUENCE | SCORE |

| | | |
|---|---|---|
| 3 | TPTRQISSI | 0.009 |
| 2 | RTPTRQISS | 0.004 |
| 7 | QISSIDTDP | 0.003 |
| 9 | SSIDTDPPA | 0.002 |
| 6 | RQISSIDTD | 0.001 |
| 5 | TRQISSIDT | 0.000 |
| 4 | PTRQISSID | 0.000 |
| 8 | ISSIDTDPP | 0.000 |
| 1 | SRTPTRQIS | 0.000 |

[0994] TABLE XII

V25 & 26-HLA-A3-9MERS-PSCA
Each peptide is a portion of SEQ ID NO: 8;
each start position is specified, the
length of peptide is 9 amino acids, and
the end position for each peptide is the
start position plus eight.

| | | |
|---|---|---|
| START | SUBSEQUENCE | SCORE |

| | | |
|---|---|---|
| 5 | QISSSDTDP | 0.002 |
| 7 | SSSDTDPPA | 0.001 |
| 4 | RQISSSDTD | 0.001 |
| 1 | TPTRQISSS | 0.001 |
| 2 | PTRQISSSD | 0.000 |
| 6 | ISSSDTDPP | 0.000 |
| 3 | TRQISSSDT | 0.000 |

[0995] TABLE XII

V26-HLA-A3-9MERS-PSCA
Each peptide is a portion of SEQ ID NO: 8;
each start position is specified, the
length of peptide is 9 amino acids, and
the end position for each peptide is the
start position plus eight.

| | | |
|---|---|---|
| START | SUBSEQUENCE | SCORE |

| | | |
|---|---|---|
| 7 | GSSDTDPPA | 0.003 |
| 5 | QIGSSDTDP | 0.002 |
| 4 | RQIGSSDTD | 0.001 |
| 1 | TPTRQIGSS | 0.000 |
| 2 | PTRQIGSSD | 0.000 |
| 8 | SSDTDPPAD | 0.000 |
| 3 | TRQIGSSDT | 0.000 |
| 9 | SDTDPPADG | 0.000 |
| 6 | IGSSDTDPP | 0.000 |

[0996] TABLE XII

V27-HLA-A3-9MERS-
PSCA
Each peptide is a portion of SEQ
ID NO: 8; each start position is
specified, the length of peptide is 9
amino acids, and the end position
for each peptide is the start
position plus eight.

| | | |
|---|---|---|
| START | SUBSEQUENCE | SCORE |

| | | |
|---|---|---|
| 1 | SRGQALRRA | 0.000 |
| 2 | RGQALRRAQ | 0.000 |

[0997] TABLE XIII

V1-HLA-A3-10MERS-PSCA
Each peptide is a portion of SEQ ID NO: 2;
each start position is specified, the
length of peptide is 10amino acids, and
the end position for each peptide is the
start position plus nine.

| | | |
|---|---|---|
| START | SUBSEQUENCE | SCORE |

| | | |
|---|---|---|
| 55 | AVGLLTVISK | 12.000 |
| 43 | QLGEQCWTAR | 6.000 |
| 18 | GTALLCYSCK | 3.000 |
| 108 | ALLPALGLLL | 2.700 |
| 12 | GLALQPGTAL | 2.700 |
| 106 | ILALLPALGL | 1.800 |
| 4 | VLLALLMAGL | 1.350 |
| 114 | GLLLWGPGQL | 0.810 |
| 57 | GLLTVISKGC | 0.675 |
| 14 | ALQPGTALLC | 0.600 |
| 109 | LLPALGLLLW | 0.600 |
| 35 | CLQVENCTQL | 0.600 |
| 99 | ALQPAAAILA | 0.600 |
| 15 | LQPGTALLCY | 0.540 |
| 21 | LLCYSCKAQV | 0.200 |
| 73 | DSQDYYVGKK | 0.081 |
| 90 | DLCNASGAHA | 0.060 |
| 69 | NCVDDSQDYY | 0.060 |
| 8 | LLMAGLALQP | 0.060 |
| 52 | RIRAVGLLTV | 0.060 |
| 5 | LLALLMAGLA | 0.060 |
| 70 | CVDDSQDYYV | 0.060 |
| 100 | LQPAAAILAL | 0.054 |
| 59 | LTVISKGCSL | 0.045 |
| 7 | ALLMAGLALQ | 0.045 |
| 9 | LMAGLALQPG | 0.045 |
| 42 | TQLGEQCWTA | 0.041 |
| 61 | VISKGCSLNC | 0.040 |
| 29 | QVSNEDCLQV | 0.040 |
| 49 | WTARIRAVGL | 0.030 |
| 78 | YVGKKNITCC | 0.030 |
| 2 | KAVLLALLMA | 0.027 |
| 83 | NITCCDTDLC | 0.020 |
| 67 | SLNCVDDSQD | 0.020 |
| 72 | DDSQDYYVGK | 0.018 |
| 6 | LALLMAGLAL | 0.018 |
| 27 | KAQVSNEDCL | 0.018 |
| 20 | ALLCYSCKAQ | 0.015 |
| 104 | AAILALLPAL | 0.013 |
| 101 | QPAAAILALL | 0.013 |
| 58 | LLTVISKGCS | 0.012 |
| 13 | LALQPGTALL | 0.009 |
| 19 | TALLCYSCKA | 0.009 |
| 98 | HALQPAAAIL | 0.009 |
| 3 | AVLLALLMAG | 0.009 |
| 68 | LNCVDDSQDY | 0.008 |
| 112 | ALGLLLWGPG | 0.006 |
| 96 | GAHALQPAAA | 0.006 |
| 103 | AAAILALLPA | 0.006 |
| 91 | LCNASGAHAL | 0.006 |
| 82 | KNITCCDTDL | 0.005 |
| 50 | TARIRAVGLL | 0.005 |
| 41 | CTQLGEQCWT | 0.005 |
| 107 | LALLPALGLL | 0.004 |
| 37 | QVENCTQLGE | 0.004 |
| 65 | GCSLNCVDDS | 0.004 |
| 45 | GEQCWTARIR | 0.004 |
| 46 | EQCWTARIRA | 0.004 |
| 88 | DTDLCNASGA | 0.003 |
| 105 | AILALLPALG | 0.003 |
| 60 | TVISKGCSLN | 0.003 |
| 85 | TCCDTDLCNA | 0.003 |
| 62 | ISKGCSLNCV | 0.002 |
| 84 | ITCCDTDLCN | 0.002 |
| 22 | LCYSCKAQVS | 0.002 |
| 40 | NCTQLGEQCW | 0.002 |
| 44 | LGEQCWTARI | 0.002 |
| 32 | NEDCLQVENC | 0.002 |
| 75 | QDYYVGKKNI | 0.002 |
| 47 | QCWTARIRAV | 0.002 |
| 94 | ASGAHALQPA | 0.002 |
| 36 | LQVENCTQLG | 0.001 |
| 10 | MAGLALQPGT | 0.001 |
| 97 | AHALQPAAAI | 0.001 |
| 53 | IRAVGLLTVI | 0.001 |
| 77 | YYVGKKNITC | 0.001 |
| 28 | AQVSNEDCLQ | 0.001 |
| 54 | RAVGLLTVIS | 0.001 |
| 93 | NASGAHALQP | 0.001 |
| 110 | LPALGLLLWG | 0.001 |
| 16 | QPGTALLCYS | 0.001 |
| 51 | ARIRAVGLLT | 0.000 |
| 74 | SQDYYVGKKN | 0.000 |
| 1 | MKAVLLALLM | 0.000 |
| 86 | CCDTDLCNAS | 0.000 |
| 80 | GKKNITCCDT | 0.000 |
| 25 | SCKAQVSNED | 0.000 |
| 24 | YSCKAQVSNE | 0.000 |
| 30 | VSNEDCLQVE | 0.000 |
| 66 | CSLNCVDDSQ | 0.000 |
| 111 | PALGLLLWGP | 0.000 |
| 26 | CKAQVSNEDC | 0.000 |
| 95 | SGAHALQPAA | 0.000 |
| 76 | DYYVGKKNIT | 0.000 |
| 39 | ENCTQLGEQC | 0.000 |
| 113 | LGLLLWGPGQ | 0.000 |
| 89 | TDLCNASGAH | 0.000 |
| 11 | AGLALQPGTA | 0.000 |
| 34 | DCLQVENCTQ | 0.000 |
| 56 | VGLLTVISKG | 0.000 |

[0998] TABLE XIII

V4-HLA-A3-10MERS-PSCA
Each peptide is a portion of SEQ ID NO: 8;
each start position is specified, the
length of peptide is 10 amino acids, and
the end position for each peptide is the
start position plus nine.

| | | |
|---|---|---|
| START | SUBSEQUENCE | SCORE |

| | | |
|---|---|---|
| 153 | HLFPQEAFPA | 4.500 |
| 146 | TLNPVLRHLF | 3.000 |
| 53 | RLWGAPLQPT | 1.688 |
| 95 | TMYVCAPVPH | 1.000 |
| 31 | RLPPSLRCSL | 0.900 |
| 1 | MTHRTTTWAR | 0.600 |
| 150 | VLRHLFPQEA | 0.600 |
| 83 | VLVPEAHPNA | 0.450 |
| 64 | GVVPQASVPL | 0.405 |
| 108 | PMALSRTPTR | 0.400 |
| 93 | SLTMYVCAPV | 0.300 |
| 62 | TLGVVPQASV | 0.300 |
| 5 | TTTWARRTSR | 0.200 |
| 35 | SLRCSLHSAC | 0.200 |
| 65 | VVPQASVPLL | 0.180 |
| 104 | HPDPPMALSR | 0.120 |
| 44 | CCSGDPASYR | 0.090 |
| 110 | ALSRTPTRQI | 0.090 |
| 178 | APSRGQALRR | 0.080 |
| 73 | LLTHPAQWEP | 0.060 |
| 22 | TPAGPMPCSR | 0.060 |
| 130 | GPSNPLCCCF | 0.060 |
| 6 | TTWARRTSRA | 0.050 |
| 172 | WSVVSPAPSR | 0.045 |
| 50 | ASYRLWGAPL | 0.045 |
| 169 | SQVWSVVSPA | 0.041 |
| 43 | ACCSGDPASY | 0.040 |
| 167 | DLSQVWSVVS | 0.036 |
| 15 | AVTPTCATPA | 0.030 |
| 102 | VPHPDPPMAL | 0.027 |
| 137 | CCFHGPAFST | 0.022 |
| 135 | LCCCFHGPAF | 0.020 |
| 39 | SLHSACCSGD | 0.020 |
| 56 | GAPLQPTLGV | 0.018 |
| 134 | PLCCCFHGPA | 0.018 |
| 11 | RTSRAVTPTC | 0.015 |
| 170 | QVWSVVSPAP | 0.015 |
| 74 | LTHPAQWEPV | 0.015 |
| 113 | RTPTRQIGSI | 0.013 |
| 157 | QEAFPAHPY | 0.012 |
| 78 | AQWEPVLVPE | 0.010 |
| 145 | STLNPVLRHL | 0.010 |
| 144 | FSTLNPVLRH | 0.009 |
| 176 | SPAPSRGQAL | 0.009 |
| 85 | VPEAHPNASL | 0.009 |
| 60 | QPTLGVVPQA | 0.009 |
| 141 | GPAFSTLNPV | 0.009 |
| 45 | CSGDPASYRL | 0.009 |
| 100 | APVPHPDPPM | 0.007 |
| 88 | AHPNASLTMY | 0.006 |
| 28 | PCSRLPPSLR | 0.006 |
| 20 | CATPAGPMPC | 0.006 |
| 27 | MPCSRLPPSL | 0.006 |
| 84 | LVPEAHPNAS | 0.006 |
| 26 | PMPCSRLPPS | 0.006 |
| 72 | PLLTHPAQWE | 0.005 |
| 21 | ATPAGPMPCS | 0.005 |
| 159 | AFPAHPIYDL | 0.004 |
| 2 | THRTTTWARR | 0.004 |
| 143 | AFSTLNPVLR | 0.004 |
| 89 | HPNASLTMYV | 0.004 |
| 177 | PAPSRGQALR | 0.004 |
| 151 | LRHLFPQEAF | 0.003 |
| 142 | PAFSTLNPVL | 0.003 |
| 66 | VPQASVPLLT | 0.003 |
| 173 | SVVSPAPSRG | 0.003 |
| 163 | HPIYDLSQVW | 0.003 |
| 71 | VPLLTHPAQW | 0.003 |
| 29 | CSRLPPSLRC | 0.003 |
| 97 | YVCAPVPHPD | 0.003 |
| 121 | SIDTDPPADG | 0.003 |
| 58 | PLQPTLGVVP | 0.003 |
| 156 | PQEAFPAHPI | 0.003 |
| 25 | GPMPCSRLPP | 0.003 |
| 138 | CFHGPAFSTL | 0.003 |
| 67 | PQASVPLLTH | 0.00 |
| 48 | DPASYRLWGA | 0.003 |
| 69 | ASVPLLTHPA | 0.002 |
| 117 | RQIGSIDTDP | 0.002 |
| 91 | NASLTMYVCA | 0.002 |
| 101 | PVPHPDPPMA | 0.002 |
| 32 | LPPSLRCSLH | 0.002 |
| 70 | SVPLLTHPAQ | 0.002 |
| 76 | HPAQWEPVLV | 0.002 |
| 118 | QIGSIDTDPP | 0.002 |
| 164 | PIYDLSQVWS | 0.002 |
| 165 | IYDLSQVWSV | 0.002 |
| 75 | THPAQWEPVL | 0.002 |
| 59 | LQPTLGVVPQ | 0.002 |
| 87 | EAHPNASLTM | 0.002 |
| 94 | LTMYVCAPVP | 0.002 |
| 92 | ASLTMYVCAP | 0.001 |
| 148 | NPVLRHLFPQ | 0.001 |
| 23 | PAGPMPCSRL | 0.001 |
| 57 | APLQPTLGVV | 0.001 |
| 16 | VTPTCATPAG | 0.001 |
| 41 | HSACCSGDPA | 0.001 |
| 115 | PTRQIGSIDT | 0.001 |
| 12 | TSRAVTPTCA | 0.001 |
| 8 | WARRTSRAVT | 0.001 |

[0999] TABLE XIII

V19-HLA-A3-10MERS-PSCA
Each peptide is a portion of SEQ ID NO: 8;
each start position is specified, the
length of peptide is 10 amino acids, and
the end position for each peptide is the
start position plus nine.

| | | |
|---|---|---|
| START | SUBSEQUENCE | SCORE |

| | | |
|---|---|---|
| 8 | RLLPSLRCSL | 1.350 |
| 9 | LLPSLRCSLH | 0.200 |
| 3 | PMPCSRLLPS | 0.012 |
| 4 | MPCSRLLPSL | 0.009 |
| 5 | PCSRLLPSLR | 0.004 |
| 6 | CSRLLPSLRC | 0.003 |
| 2 | GPMPCSRLLP | 0.003 |
| 10 | LPSLRCSLHS | 0.001 |
| 1 | AGPMPCSRLL | 0.000 |
| 7 | SRLLPSLRCS | 0.000 |

[1000] TABLE XIII

V20-HLA-A3-10MERS-PSCA
Each peptide is a portion of SEQ ID NO: 8;
each start position is specified, the
length of peptide is 10 amino acids, and
the end position for each peptide is the
start position plus nine.

| | | |
|---|---|---|
| START | SUBSEQUENCE | SCORE |

| | | |
|---|---|---|
| 2 | CCSGDPASSR | 0.090 |
| 8 | ASSRLWGAPL | 0.009 |
| 3 | CSGDPASSRL | 0.003 |
| 6 | DPASSRLWGA | 0.003 |
| 1 | ACCSGDPASS | 0.000 |
| 5 | GDPASSRLWG | 0.000 |
| 9 | SSRLWGAPLQ | 0.000 |
| 10 | SRLWGAPLQP | 0.000 |
| 4 | SGDPASSRLW | 0.000 |
| 7 | PASSRLWGAP | 0.000 |

[1001] TABLE XIII

V21 & 22-HLA-A3-10MERS-PSCA
Each peptide is a portion of SEQ ID NO: 8;
each start position is specified, the
length of peptide is 10 amino acids, and
the end position for each peptide is the
start position plus nine.

| | | |
|---|---|---|
| START | SUBSEQUENCE | SCORE |

| | | |
|---|---|---|
| 7 | LTDLAQWEPV | 0.010 |
| 3 | SVPLLTDLAQ | 0.004 |
| 4 | VPLLTDLAQW | 0.003 |
| 1 | QASVPLLTDL | 0.002 |
| 9 | DLAQWEPVLV | 0.001 |
| 6 | LLTDLAQWEP | 0.001 |
| 8 | TDLAQWEPVL | 0.000 |
| 2 | ASVPLLTDLA | 0.000 |
| 5 | PLLTDLAQWE | 0.000 |

[1002] TABLE XIII

V22-HLA-A3-10MERS-PSCA
Each peptide is a portion of SEQ ID NO: 8;
each start position is specified, the
length of peptide is 10 amino acids, and
the end position for each peptide is the
start position plus nine.

| | | |
|---|---|---|
| START | SUBSEQUENCE | SCORE |

| | | |
|---|---|---|
| 9 | HLAQWEPVLV | 0.200 |
| 6 | LLTHLAQWEP | 0.060 |
| 7 | LTHLAQWEPV | 0.010 |
| 1 | QASVPLLTHL | 0.009 |
| 4 | VPLLTHLAQW | 0.005 |
| 3 | SVPLLTHLAQ | 0.004 |
| 5 | PLLTHLAQWE | 0.003 |
| 8 | THLAQWEPVL | 0.003 |
| 2 | ASVPLLTHLA | 0.002 |
| 10 | LAQWEPVLVP | 0.002 |

[1003] TABLE XIII

V24-HLA-A3-10MERS-PSCA
Each peptide is a portion of SEQ ID NO: 8;
each start position is specified, the
length of peptide is 10 amino acids, and
the end position for each peptide is the
start position plus nine.

| | | |
|---|---|---|
| START | SUBSEQUENCE | SCORE |

| | | |
|---|---|---|
| 5 | TMYVCTPVPH | 1.000 |
| 3 | SLTMYVCTPV | 0.300 |
| 10 | TPVPHPDPPM | 0.007 |
| 7 | YVCTPVPHPD | 0.003 |
| 4 | LTMYVCTPVP | 0.002 |
| 2 | ASLTMYVCTP | 0.001 |
| 9 | CTPVPHPDPP | 0.001 |
| 1 | NASLTMYVCT | 0.001 |
| 8 | VCTPVPHPDP | 0.000 |
| 6 | MYVCTPVPHP | 0.000 |

[1004] TABLE XIII

V25-HLA-A3-10MERS-PSCA
Each peptide is a portion of SEQ ID NO: 8;
each start position is specified, the
length of peptide is 10 amino acids, and
the end position for each peptide is the
start position plus nine.

| | | |
|---|---|---|
| START | SUBSEQUENCE | SCORE |

| | | |
|---|---|---|
| 3 | RTPTRQISSI | 0.045 |
| 8 | QISSIDTDPP | 0.002 |
| 7 | RQISSIDTDP | 0.001 |
| 9 | ISSIDTDPPA | 0.001 |
| 5 | PTRQISSIDT | 0.001 |
| 4 | TPTRQISSID | 0.000 |
| 1 | LSRTPTRQIS | 0.000 |
| 10 | SSIDTDPPAD | 0.000 |
| 2 | SRTPTRQISS | 0.000 |
| 6 | TRQISSIDTD | 0.000 |

[1005] TABLE XIII

V25 & 26-HLA-A3-10MERS-PSCA
Each peptide is a portion of SEQ ID NO: 8;
each start position is specified, the
length of peptide is 10 amino acids, and
the end position for each peptide is the
start position plus nine.

| | | |
|---|---|---|
| START | SUBSEQUENCE | SCORE |

| | | |
|---|---|---|
| 1 | RTPTRQISSS | 0.003 |
| 6 | QISSSDTDPP | 0.002 |
| 7 | ISSSDTDPPA | 0.001 |
| 5 | RQISSSDTDP | 0.001 |
| 3 | PTRQISSSDT | 0.001 |
| 2 | TPTRQISSSD | 0.000 |
| 8 | SSSDTDPPAD | 0.000 |
| 4 | TRQISSSDTD | 0.000 |

[1006] TABLE XIII

V26-HLA-A3-10MERS-PSCA
Each peptide is a portion of SEQ ID NO: 8;
each start position is specified, the
length of peptide is 10 amino acids, and
the end position for each peptide is the
start position plus nine.

| | | |
|---|---|---|
| START | SUBSEQUENCE | SCORE |

| | | |
|---|---|---|
| 6 | QIGSSDTDPP | 0.002 |
| 5 | RQIGSSDTDP | 0.001 |
| 1 | RTPTRQIGSS | 0.001 |
| 3 | PTRQIGSSDT | 0.001 |
| 8 | GSSDTDPPAD | 0.000 |
| 2 | TPTRQIGSSD | 0.000 |
| 7 | IGSSDTDPPA | 0.000 |
| 9 | SSDTDPPADG | 0.000 |
| 10 | SDTDPPADGP | 0.000 |
| 4 | TRQIGSSDTD | 0.000 |

[1007] TABLE XIII

V27-HLA-A3-10MERS-PSCA
Each peptide is a portion of SEQ ID NO: 8;
each start position is specified, the
length of peptide is 10 amino acids, and
the end position for each peptide is the
start position plus nine.

| | | |
|---|---|---|
| START | SUBSEQUENCE | SCORE |

| | | |
|---|---|---|
| 1 | PSRGQALRRA | 0.000 |
| 2 | SRGQALRRAQ | 0.000 |

[1008] TABLE XIV

V1-HLA-A1101-9MERS-PSCA
Each peptide is a portion of SEQ ID NO: 2;
each start position is specified, the
length of peptide is 9 amino acids, and
the end position for each peptide is the
start position plus eight.

| | | |
|---|---|---|
| START | SUBSEQUENCE | SCORE |

| | | |
|---|---|---|
| 74 | SQDYYVGKK | 0.600 |
| 19 | TALLCYSCK | 0.300 |
| 56 | VGLLTVISK | 0.060 |
| 3 | AVLLALLMA | 0.060 |
| 60 | TVISKGCSL | 0.030 |
| 70 | CVDDSQDYY | 0.020 |
| 2 | KAVLLALLM | 0.018 |
| 12 | GLALQPGTA | 0.012 |
| 7 | ALLMAGLAL | 0.012 |
| 100 | LQPAAAILA | 0.012 |
| 41 | CTQLGEQCW | 0.010 |
| 36 | LQVENCTQL | 0.009 |
| 28 | AQVSNEDCL | 0.009 |
| 54 | RAVGLLTVI | 0.009 |
| 47 | QCWTARIRA | 0.008 |
| 43 | QLGEQCWTA | 0.008 |
| 109 | LLPALGLLL | 0.008 |
| 108 | ALLPALGLL | 0.006 |
| 73 | DSQDYYVGK | 0.006 |
| 115 | LLLWGPGQL | 0.006 |
| 107 | LALLPALGL | 0.006 |
| 104 | AAILALLPA | 0.006 |
| 20 | ALLCYSCKA | 0.006 |
| 96 | GAHALQPAA | 0.006 |
| 18 | GTALLCYSC | 0.006 |
| 105 | AILALLPAL | 0.006 |
| 5 | LLALLMAGL | 0.004 |
| 44 | LGEQCWTAR | 0.004 |
| 83 | NITCCDTDL | 0.004 |
| 22 | LCYSCKAQV | 0.004 |
| 110 | LPALGLLLW | 0.004 |
| 99 | ALQPAAAIL | 0.004 |
| 101 | QPAAAILAL | 0.004 |
| 78 | YVGKKNITC | 0.004 |
| 14 | ALQPGTALL | 0.004 |
| 16 | QPGTALLCY | 0.004 |
| 46 | EQCWTARIR | 0.004 |
| 13 | LALQPGTAL | 0.003 |
| 6 | LALLMAGLA | 0.003 |
| 69 | NCVDDSQDY | 0.003 |
| 98 | HALQPAAAI | 0.003 |
| 52 | RIRAVGLLT | 0.002 |
| 29 | QVSNEDCLQ | 0.002 |
| 91 | LCNASGAHA | 0.002 |
| 50 | TARIRAVGL | 0.002 |
| 55 | AVGLLTVIS | 0.002 |
| 37 | QVENCTQLG | 0.002 |
| 86 | CCDTDLCNA | 0.002 |
| 57 | GLLTVISKG | 0.002 |
| 114 | GLLLWGPGQ | 0.002 |
| 45 | GEQCWTARI | 0.002 |
| 59 | LTVISKGCS | 0.002 |
| 4 | VLLALLMAG | 0.001 |
| 15 | LQPGTALLC | 0.001 |
| 90 | DLCNASGAH | 0.001 |
| 76 | DYYVGKKNI | 0.001 |
| 84 | ITCCDTDLC | 0.001 |
| 49 | WTARIRAVG | 0.001 |
| 42 | TQLGEQCWT | 0.001 |
| 112 | ALGLLLWGP | 0.001 |
| 9 | LMAGLALQP | 0.001 |
| 8 | LLMAGLALQ | 0.001 |
| 77 | YYVGKKNIT | 0.001 |
| 65 | GCSLNCVDD | 0.001 |
| 27 | KAQVSNEDC | 0.001 |
| 30 | VSNEDCLQV | 0.000 |
| 35 | CLQVENCTQ | 0.000 |
| 71 | VDDSQDYYV | 0.000 |
| 61 | VISKGCSLN | 0.000 |
| 106 | ILALLPALG | 0.000 |
| 85 | TCCDTDLCN | 0.000 |
| 92 | CNASGAHAL | 0.000 |
| 53 | IRAVGLLTV | 0.000 |
| 23 | CYSCKAQVS | 0.000 |
| 67 | SLNCVDDSQ | 0.000 |
| 103 | AAAILALLP | 0.000 |
| 89 | TDLCNASGA | 0.000 |
| 88 | DTDLCNASG | 0.000 |
| 51 | ARIRAVGLL | 0.000 |
| 58 | LLTVISKGC | 0.000 |
| 40 | NCTQLGEQC | 0.000 |
| 63 | SKGCSLNCV | 0.000 |
| 93 | NASGAHALQ | 0.000 |
| 10 | MAGLALQPG | 0.000 |
| 21 | LLCYSCKAQ | 0.000 |
| 25 | SCKAQVSNE | 0.000 |
| 95 | SGAHALQPA | 0.000 |
| 1 | MKAVLLALL | 0.000 |
| 97 | AHALQPAAA | 0.000 |
| 102 | PAAAILALL | 0.000 |
| 82 | KNITCCDTD | 0.000 |
| 38 | VENCTQLGE | 0.000 |
| 34 | DCLQVENCT | 0.000 |
| 80 | GKKNITCCD | 0.000 |
| 64 | KGCSLNCVD | 0.000 |
| 111 | PALGLLLWG | 0.000 |
| 81 | KKNITCCDT | 0.000 |
| 32 | NEDCLQVEN | 0.000 |
| 68 | LNCVDDSQD | 0.000 |
| 94 | ASGAHALQP | 0.000 |

[1009] TABLE XIV

V4-HLA-A1101-9MERS-PSCA
Each peptide is a portion of SEQ ID NO: 8;
each start position is specified, the
length of peptide is 9 amino acids, and
the end position for each peptide is the
start position plus eight.

| | | |
|---|---|---|
| START | SUBSEQUENCE | SCORE |

| | | |
|---|---|---|
| 173 | SVVSPAPSR | 0.600 |
| 6 | TTWARRTSR | 0.400 |
| 109 | MALSRTPTR | 0.060 |
| 178 | APSRGQALR | 0.040 |
| 170 | QVWSVVSPA | 0.040 |
| 145 | STLNPVLRH | 0.030 |
| 84 | LVPEAHPNA | 0.020 |
| 94 | LTMYVCAPV | 0.020 |
| 65 | VVPQASVPL | 0.020 |
| 70 | SVPLLTHPA | 0.020 |
| 16 | VTPTCATPA | 0.010 |
| 1 | MTHRTTTWA | 0.010 |
| 64 | GVVPQASVP | 0.009 |
| 2 | THRTTTWAR | 0.008 |
| 154 | LFPQEAFPA | 0.006 |
| 113 | RTPTRQIGS | 0.006 |
| 57 | APLQPTLGV | 0.006 |
| 96 | MYVCAPVPH | 0.006 |
| 53 | RLWGAPLQP | 0.005 |
| 3 | HRTTTWARR | 0.004 |
| 68 | QASVPLLTH | 0.004 |
| 160 | FPAHPIYDL | 0.004 |
| 51 | SYRLWGAPL | 0.004 |
| 29 | CSRLPPSLR | 0.004 |
| 23 | PAGPMPCSR | 0.004 |
| 45 | CSGDPASYR | 0.004 |
| 144 | FSTLNPVLR | 0.004 |
| 35 | SLRCSLHSA | 0.004 |
| 11 | RTSRAVTPT | 0.003 |
| 163 | HPIYDLSQV | 0.003 |
| 117 | RQIGSIDTD | 0.003 |
| 78 | AQWEPVLVP | 0.002 |
| 114 | TPTRQIGSI | 0.002 |
| 15 | AVTPTCATP | 0.002 |
| 19 | TCATPAGPM | 0.002 |
| 32 | LPPSLRCSL | 0.002 |
| 97 | YVCAPVPHP | 0.002 |
| 66 | VPQASVPLL | 0.002 |
| 42 | SACCSGDPA | 0.002 |
| 74 | LTHPAQWEP | 0.002 |
| 143 | AFSTLNPVL | 0.002 |
| 102 | VPHPDPPMA | 0.002 |
| 89 | HPNASLTMY | 0.002 |
| 176 | SPAPSRGQA | 0.002 |
| 101 | PVPHPDPPM | 0.002 |
| 76 | HPAQWEPVL | 0.002 |
| 135 | LCCCFHGPA | 0.002 |
| 44 | CCSGDPASY | 0.002 |
| 21 | ATPAGPMPC | 0.002 |
| 136 | CCCFHGPAF | 0.002 |
| 155 | FPQEAFPAH | 0.002 |
| 174 | VVSPAPSRG | 0.002 |
| 61 | PTLGVVPQA | 0.002 |
| 181 | RGQALRRAR | 0.001 |
| 141 | GPAFSTLNP | 0.001 |
| 158 | EAFPAHPIY | 0.001 |
| 167 | DLSQVWSVV | 0.001 |
| 120 | GSIDTDPPA | 0.001 |
| 152 | RHLFPQEAF | 0.001 |
| 133 | NPLCCCFHG | 0.001 |
| 169 | SQVWSVVSP | 0.001 |
| 14 | RAVTPTCAT | 0.001 |
| 149 | PVLRHLFPQ | 0.001 |
| 81 | EPVLVPEAH | 0.001 |
| 105 | PDPPMALSR | 0.001 |
| 179 | PSRGQALRR | 0.001 |
| 164 | PIYDLSQVW | 0.001 |
| 95 | TMYVCAPVP | 0.001 |
| 153 | HLFPQEAFP | 0.001 |
| 56 | GAPLQPTLG | 0.001 |
| 83 | VLVPEAHPN | 0.001 |
| 59 | LQPTLGVVP | 0.001 |
| 166 | YDLSQVWSV | 0.001 |
| 72 | PLLTHPAQW | 0.001 |
| 130 | GPSNPLCCC | 0.001 |
| 37 | RCSLHSACC | 0.001 |
| 148 | NPVLRHLFP | 0.001 |
| 138 | CFHGPAFST | 0.001 |
| 80 | WEPVLVPEA | 0.001 |
| 157 | QEAFPAHPI | 0.001 |
| 91 | NASLTMYVC | 0.000 |
| 121 | SIDTDPPAD | 0.000 |
| 150 | VLRHLFPQE | 0.000 |
| 147 | LNPVLRHLF | 0.000 |
| 137 | CCFHGPAFS | 0.000 |
| 39 | SLHSACCSG | 0.000 |
| 118 | QIGSIDTDP | 0.000 |
| 46 | SGDPASYRL | 0.000 |
| 132 | SNPLCCCFH | 0.000 |
| 110 | ALSRTPTRQ | 0.000 |
| 93 | SLTMYVCAP | 0.000 |
| 159 | AFPAHPIYD | 0.000 |
| 58 | PLQPTLGVV | 0.000 |
| 62 | TLGVVPQAS | 0.000 |
| 146 | TLNPVLRHL | 0.000 |
| 73 | LLTHPAQWE | 0.000 |
| 88 | AHPNASLTM | 0.000 |
| 165 | IYDLSQVWS | 0.000 |
| 49 | PASYRLWGA | 0.000 |
| 142 | PAFSTLNPV | 0.000 |

[1010] TABLE XIV

V19-HLA-A1101-9MERS-PSCA
Each peptide is a portion of SEQ ID NO: 8;
each start position is specified, the
length of peptide is 9 amino acids, and
the end position for each peptide is the
start position plus eight.

| | | |
|---|---|---|
| START | SUBSEQUENCE | SCORE |

| | | |
|---|---|---|
| 5 | CSRLLPSLR | 0.004 |
| 8 | LLPSLRCSL | 0.004 |
| 9 | LPSLRCSLH | 0.002 |
| 1 | GPMPCSRLL | 0.001 |
| 3 | MPCSRLLPS | 0.000 |
| 4 | PCSRLLPSL | 0.000 |
| 7 | RLLPSLRCS | 0.000 |
| 2 | PMPCSRLLP | 0.000 |
| 6 | SRLLPSLRC | 0.000 |

[1011] TABLE XIV

V20-HLA-A1101-9MERS-PSCA
Each peptide is a portion of SEQ ID NO: 8;
each start position is specified, the
length of peptide is 9 amino acids, and
the end position for each peptide is the
start position plus eight.

| | | |
|---|---|---|
| START | SUBSEQUENCE | SCORE |

| | | |
|---|---|---|
| 2 | CSGDPASSR | 0.004 |
| 6 | PASSRLWGA | 0.000 |
| 8 | SSRLWGAPL | 0.000 |
| 1 | CCSGDPASS | 0.000 |
| 3 | SGDPASSRL | 0.000 |
| 5 | DPASSRLWG | 0.000 |
| 4 | GDPASSRLW | 0.000 |
| 9 | SRLWGAPLQ | 0.000 |
| 7 | ASSRLWGAP | 0.000 |

[1012] TABLE XIV

V21-HLA-A1101-9MERS-PSCA
Each peptide is a portion of SEQ ID NO: 8;
each start position is specified, the
length of peptide is 9 amino acids, and
the end position for each peptide is the
start position plus eight.

| | | |
|---|---|---|
| START | SUBSEQUENCE | SCORE |

| | | |
|---|---|---|
| 3 | SVPLLTDPA | 0.020 |
| 7 | LTDPAQWEP | 0.002 |
| 5 | PLLTDPAQW | 0.001 |
| 9 | DPAQWEPVL | 0.001 |
| 6 | LLTDPAQWE | 0.000 |
| 1 | QASVPLLTD | 0.000 |
| 4 | VPLLTDPAQ | 0.000 |
| 8 | TDPAQWEPV | 0.000 |
| 2 | ASVPLLTDP | 0.000 |

[1013] TABLE XIV

V21 & 22-HLA-A1101-9MERS-PSCA
Each peptide is a portion of SEQ ID NO: 8;
each start position is specified, the
length of peptide is 9 amino acids, and
the end position for each peptide is the
start position plus eight.

| | | |
|---|---|---|
| START | SUBSEQUENCE | SCORE |

| | | |
|---|---|---|
| 2 | SVPLLTDLA | 0.020 |
| 6 | LTDLAQWEP | 0.002 |
| 8 | DLAQWEPVL | 0.001 |
| 3 | VPLLTDLAQ | 0.001 |
| 4 | PLLTDLAQW | 0.001 |
| 5 | LLTDLAQWE | 0.000 |
| 7 | TDLAQWEPV | 0.000 |
| 1 | ASVPLLTDL | 0.000 |

[1014] TABLE XIV

V22-HLA-A1101-
9MERS-PSCA
Each peptide is a portion of SEQ ID
NO: 8; each start position is
specified, the length of peptide is 9
amino acids, and the end position
for each peptide is the start position
plus eight.

| | | |
|---|---|---|
| START | SUBSEQUENCE | SCORE |

| | | |
|---|---|---|
| 2 | SVPLLTHLA | 0.020 |
| 8 | HLAQWEPVL | 0.004 |
| 9 | LAQWEPVLV | 0.002 |
| 6 | LTHLAQWEP | 0.002 |
| 3 | VPLLTHLAQ | 0.001 |
| 4 | PLLTHLAQW | 0.001 |
| 5 | LLTHLAQWE | 0.000 |
| 7 | THLAQWEPV | 0.000 |
| 1 | ASVPLLTHL | 0.000 |

[1015] TABLE XIV

V24-HLA-A1101-9MERS-PSCA
Each peptide is a portion of SEQ ID NO: 8;
each start position is specified, the
length of peptide is 9 amino acids, and
the end position for each peptide is the
start position plus eight.

| | | |
|---|---|---|
| START | SUBSEQUENCE | SCORE |

| | | |
|---|---|---|
| 3 | LTMYVCTPV | 0.020 |
| 5 | MYVCTPVPH | 0.006 |
| 6 | YVCTPVPHP | 0.002 |
| 8 | CTPVPHPDP | 0.001 |
| 4 | TMYVCTPVP | 0.001 |
| 2 | SLTMYVCTP | 0.000 |
| 7 | VCTPVPHPD | 0.000 |
| 1 | ASLTMYVCT | 0.000 |

[1016] TABLE XIV

V25-HLA-A1101-9MERS-PSCA
Each peptide is a portion of SEQ ID NO: 8;
each start position is specified, the
length of peptide is 9 amino acids, and
the end position for each peptide is the
start position plus eight.

| | | |
|---|---|---|
| START | SUBSEQUENCE | SCORE |

| | | |
|---|---|---|
| 2 | RTPTRQISS | 0.006 |
| 6 | RQISSIDTD | 0.003 |
| 3 | TPTRQISSI | 0.002 |
| 7 | QISSIDTDP | 0.000 |
| 9 | SSIDTDPPA | 0.000 |
| 4 | PTRQISSID | 0.000 |
| 5 | TRQISSIDT | 0.000 |
| 8 | ISSIDTDPP | 0.000 |
| 1 | SRTPTRQIS | 0.000 |

[1017] TABLE XIV

V25 & 26-HLA-A1101-9MERS-PSCA
Each peptide is a portion of SEQ ID NO: 8;
each start position is specified, the
length of peptide is 9 amino acids, and
the end position for each peptide is the
start position plus eight.

| | | |
|---|---|---|
| START | SUBSEQUENCE | SCORE |

| | | |
|---|---|---|
| 4 | RQISSSDTD | 0.003 |
| 5 | QISSSDTDP | 0.000 |
| 7 | SSSDTDPPA | 0.000 |
| 1 | TPTRQISSS | 0.000 |
| 2 | PTRQISSSD | 0.000 |
| 3 | TRQISSSDT | 0.000 |
| 6 | ISSSDTDPP | 0.000 |

[1018] TABLE XIV

V26-HLA-A1101-9MERS-PSCA
Each peptide is a portion of SEQ ID NO: 8;
each start position is specified, the
length of peptide is 9 amino acids, and
the end position for each peptide is the
start position plus eight.

| | | |
|---|---|---|
| START | SUBSEQUENCE | SCORE |

| | | |
|---|---|---|
| 4 | RQIGSSDTD | 0.003 |
| 7 | GSSDTDPPA | 0.001 |
| 5 | QIGSSDTDP | 0.000 |
| 1 | TPTRQIGSS | 0.000 |
| 2 | PTRQIGSSD | 0.000 |
| 6 | IGSSDTDPP | 0.000 |
| 8 | SSDTDPPAD | 0.000 |
| 3 | TRQIGSSDT | 0.000 |
| 9 | SDTDPPADG | 0.000 |

[1019] TABLE XIV

V27-HLA-A1101-9MERS-PSCA
Each peptide is a portion of SEQ ID NO: 8;
each start position is specified, the
length of peptide is 9 amino acids, and
the end position for each peptide is the
start position plus eight.

| | | |
|---|---|---|
| START | SUBSEQUENCE | SCORE |

| | | |
|---|---|---|
| 1 | SRGQALRRA | 0.000 |
| 2 | RGQALRRAQ | 0.000 |

[1020] TABLE XV

V1-HLA-A1101-10MERS-PSCA
Each peptide is a portion of SEQ ID NO: 2;
each start position is specified, the
length of peptide is 10 amino acids, and
the end position for each peptide is the
start position plus nine.

| | | |
|---|---|---|
| START | SUBSEQUENCE | SCORE |

| | | |
|---|---|---|
| 55 | AVGLLTVISK | 4.000 |
| 18 | GTALLCYSCK | 3.000 |
| 43 | QLGEQCWTAR | 0.080 |
| 29 | QVSNEDCLQV | 0.040 |
| 70 | CVDDSQDYYV | 0.040 |
| 52 | RIRAVGLLTV | 0.024 |
| 114 | GLLLWGPGQL | 0.018 |
| 2 | KAVLLALLMA | 0.018 |
| 42 | TQLGEQCWTA | 0.018 |
| 59 | LTVISKGCSL | 0.015 |
| 12 | GLALQPGTAL | 0.012 |
| 100 | LQPAAAILAL | 0.012 |
| 108 | ALLPALGLLL | 0.012 |
| 15 | LQPGTALLCY | 0.012 |
| 49 | WTARIRAVGL | 0.010 |
| 106 | ILALLPALGL | 0.008 |
| 99 | ALQPAAAILA | 0.008 |
| 109 | LLPALGLLLW | 0.008 |
| 27 | KAQVSNEDCL | 0.006 |
| 73 | DSQDYYVGKK | 0.006 |
| 3 | AVLLALLMAG | 0.006 |
| 6 | LALLMAGLAL | 0.006 |
| 4 | VLLALLMAGL | 0.006 |
| 96 | GAHALQPAAA | 0.006 |
| 72 | DDSQDYYVGK | 0.006 |
| 21 | LLCYSCKAQV | 0.004 |
| 103 | AAAILALLPA | 0.004 |
| 37 | QVENCTQLGE | 0.004 |
| 35 | CLQVENCTQL | 0.004 |
| 5 | LLALLMAGLA | 0.004 |
| 46 | EQCWTARIRA | 0.004 |
| 45 | GEQCWTARIR | 0.004 |
| 19 | TALLCYSCKA | 0.003 |
| 107 | LALLPALGLL | 0.003 |
| 69 | NCVDDSQDYY | 0.003 |
| 60 | TVISKGCSLN | 0.003 |
| 104 | AAILALLPAL | 0.003 |
| 13 | LALQPGTALL | 0.003 |
| 98 | HALQPAAAIL | 0.003 |
| 88 | DTDLCNASGA | 0.003 |
| 84 | ITCCDTDLCN | 0.002 |
| 91 | LCNASGAHAL | 0.002 |
| 85 | TCCDTDLCNA | 0.002 |
| 50 | TARIRAVGLL | 0.002 |
| 78 | YVGKKNITCC | 0.002 |
| 101 | QPAAAILALL | 0.002 |
| 40 | NCTQLGEQCW | 0.002 |
| 82 | KNITCCDTDL | 0.002 |
| 8 | LLMAGLALQP | 0.002 |
| 77 | YYVGKKNITC | 0.001 |
| 90 | DLCNASGAHA | 0.001 |
| 41 | CTQLGEQCWT | 0.001 |
| 28 | AQVSNEDCLQ | 0.001 |
| 54 | RAVGLLTVIS | 0.001 |
| 36 | LQVENCTQLG | 0.001 |
| 57 | GLLTVISKGC | 0.001 |
| 14 | ALQPGTALLC | 0.001 |
| 61 | VISKGCSLNC | 0.001 |
| 65 | GCSLNCVDDS | 0.001 |
| 105 | AILALLPALG | 0.001 |
| 7 | ALLMAGLALQ | 0.001 |
| 83 | NITCCDTDLC | 0.000 |
| 47 | QCWTARIRAV | 0.000 |
| 68 | LNCVDDSQDY | 0.000 |
| 1 | MKAVLLALLM | 0.000 |
| 110 | LPALGLLLWG | 0.000 |
| 9 | LMAGLLALQPG | 0.000 |
| 22 | LCYSCKAQVS | 0.000 |
| 23 | CYSCKAQVSN | 0.000 |
| 67 | SLNCVDDSQD | 0.000 |
| 112 | ALGLLLWGPG | 0.000 |
| 58 | LLTVISKGCS | 0.000 |
| 93 | NASGAHALQP | 0.000 |
| 20 | ALLCYSCKAQ | 0.000 |
| 74 | SQDYYVGKKN | 0.000 |
| 11 | AGLALQPGTA | 0.000 |
| 89 | TDLCNASGAH | 0.000 |
| 76 | DYYVGKKNIT | 0.000 |
| 16 | QPGTALLCYS | 0.000 |
| 10 | MAGLALQPGT | 0.000 |
| 86 | CCDTDLCNAS | 0.000 |
| 75 | QDYYVGKKNI | 0.000 |
| 94 | ASGAHALQPA | 0.000 |
| 53 | IRAVGLLTVI | 0.000 |
| 95 | SGAHALQPAA | 0.000 |
| 62 | ISKGCSLNCV | 0.000 |
| 97 | AHALQPAAAI | 0.000 |
| 44 | LGEQCWTARI | 0.000 |
| 25 | SCKAQVSNED | 0.000 |
| 34 | DCLQVENCTQ | 0.000 |
| 51 | ARIRAVGLLT | 0.000 |
| 111 | PALGLLLWGP | 0.000 |
| 81 | KKNITCCDTD | 0.000 |
| 64 | KGCSLNCVDD | 0.000 |
| 80 | GKKNITCCDT | 0.000 |
| 32 | NEDCLQVENC | 0.000 |
| 38 | VENCTQLGEQ | 0.000 |
| 92 | CNASGAHALQ | 0.000 |
| 102 | PAAAILALLP | 0.000 |
| 31 | SNEDCLQVEN | 0.000 |

[1021] TABLE XV

V4-HLA-A1101-10MERS-PSCA
Each peptide is a portion of SEQ ID NO: 8;
each start position is specified, the
length of peptide is 10 amino acids, and
the end position for each peptide is the
start position plus nine.

| | | |
|---|---|---|
| START | SUBSEQUENCE | SCORE |

| | | |
|---|---|---|
| 1 | MTHRTTTWAR | 0.400 |
| 5 | TTTWARRTSR | 0.200 |
| 64 | GVVPQASVPL | 0.090 |
| 178 | APSRGQALRR | 0.080 |
| 104 | HPDPPMALSR | 0.080 |
| 143 | AFSTLNPVLR | 0.040 |
| 44 | CCSGDPASYR | 0.040 |
| 22 | TPAGPMPCSR | 0.040 |
| 113 | RTPTRQIGSI | 0.030 |
| 153 | HLFPQEAFPA | 0.024 |
| 15 | AVTPTCATPA | 0.020 |
| 6 | TTWARRTSRA | 0.020 |
| 65 | VVPQASVPLL | 0.020 |
| 31 | RLPPSLRCSL | 0.012 |
| 56 | GAPLQPTLGV | 0.012 |
| 74 | LTHPAQWEPV | 0.010 |
| 169 | SQVWSVVSPA | 0.009 |
| 95 | TMYVCAPVPH | 0.008 |
| 108 | PMALSRTPTR | 0.008 |
| 165 | IYDLSQVWSV | 0.008 |
| 172 | WSVVSPAPSR | 0.006 |
| 83 | VLVPEAHPNA | 0.006 |
| 130 | GPSNPLCCCF | 0.006 |
| 141 | GPAFSTLNPV | 0.006 |
| 62 | TLGVVPQASV | 0.004 |
| 146 | TLNPVLRHLF | 0.004 |
| 170 | QVWSVVSPAP | 0.004 |
| 102 | VPHPDPPMAL | 0.004 |
| 177 | PAPSRGQALR | 0.004 |
| 150 | VLRHLFPQEA | 0.004 |
| 28 | PCSRLPPSLR | 0.004 |
| 89 | HPNASLTMYV | 0.004 |
| 93 | SLTMYVCAPV | 0.004 |
| 159 | AFPAHPIYDL | 0.004 |
| 2 | THRTTTWARR | 0.004 |
| 163 | HPIYDLSQVW | 0.003 |
| 100 | APVPHPDPPM | 0.003 |
| 173 | SVVSPAPSRG | 0.003 |
| 57 | APLQPTLGVV | 0.003 |
| 11 | RTSRAVTPTC | 0.003 |
| 71 | VPLLTHPAQW | 0.003 |
| 117 | RQIGSIDTDP | 0.003 |
| 25 | GPMPCSRLPP | 0.002 |
| 53 | RLWGAPLQPT | 0.002 |
| 70 | SVPLLTHPAQ | 0.002 |
| 43 | ACCSGDPASY | 0.002 |
| 91 | NASLTMYVCA | 0.002 |
| 94 | LTMYVCAPVP | 0.002 |
| 97 | YVCAPVPHPD | 0.002 |
| 84 | LVPEAHPNAS | 0.002 |
| 76 | HPAQWEPVLV | 0.002 |
| 32 | LPPSLRCSLH | 0.002 |
| 60 | QPTLGVVPQA | 0.002 |
| 85 | VPEAHPNASL | 0.002 |
| 27 | MPCSRLPPSL | 0.002 |
| 101 | PVPHPDPPMA | 0.002 |
| 154 | LFPQEAFPAH | 0.002 |
| 176 | SPAPSRGQAL | 0.002 |
| 138 | CFHGPAFSTL | 0.002 |
| 135 | LCCCFHGPAF | 0.002 |
| 145 | STLNPVLRHL | 0.002 |
| 137 | CCFHGPAFST | 0.001 |
| 67 | PQASVPLLTH | 0.001 |
| 78 | AQWEPVLVPE | 0.001 |
| 87 | EAHPNASLTM | 0.001 |
| 48 | DPASYRLWGA | 0.001 |
| 21 | ATPAGPMPCS | 0.001 |
| 16 | VTPTCATPAG | 0.001 |
| 18 | PTCATPAGPM | 0.001 |
| 148 | NPVLRHLFPQ | 0.001 |
| 14 | RAVTPTCATP | 0.001 |
| 73 | LLTHPAQWEP | 0.001 |
| 96 | MYVCAPVPHP | 0.001 |
| 59 | LQPTLGVVPQ | 0.001 |
| 37 | RCSLHSACCS | 0.001 |
| 156 | PQEAFPAHPI | 0.001 |
| 80 | WEPVLVPEAH | 0.001 |
| 157 | QEAFPAHPIY | 0.001 |
| 180 | SRGQALRRAR | 0.000 |
| 121 | SIDTDPPADG | 0.000 |
| 134 | PLCCCFHGPA | 0.000 |
| 66 | VPQASVPLLT | 0.000 |
| 144 | FSTLNPVLRH | 0.000 |
| 20 | CATPAGPMPC | 0.000 |
| 118 | QIGSIDTDPP | 0.000 |
| 142 | PAFSTLNPVL | 0.000 |
| 35 | SLRCSLHSAC | 0.000 |
| 51 | SYRLWGAPLQ | 0.000 |
| 50 | ASYRLWGAPL | 0.000 |
| 39 | SLHSACCSGD | 0.000 |
| 110 | ALSRTPTRQI | 0.000 |
| 45 | CSGDPASYRL | 0.000 |
| 69 | ASVPLLTHPA | 0.000 |
| 4 | RTTTWARRTS | 0.000 |
| 123 | DTDPPADGPS | 0.000 |
| 166 | YDLSQVWSVV | 0.000 |
| 82 | PVLVPEAHPN | 0.000 |
| 133 | NPLCCCFHGP | 0.000 |
| 149 | PVLRHLFPQE | 0.000 |
| 109 | MALSRTPTRQ | 0.000 |

[1022] TABLE XV

V19-HLA-A1101-10MERS-PSCA
Each peptide is a portion of SEQ ID NO: 8;
each start position is specified, the
length of peptide is 10 amino acids, and
the end position for each peptide is the
start position plus nine.

| | | |
|---|---|---|
| START | SUBSEQUENCE | SCORE |

| | | |
|---|---|---|
| 8 | RLLPSLRCSL | 0.018 |
| 9 | LLPSLRCSLH | 0.004 |
| 5 | PCSRLLPSLR | 0.004 |
| 2 | GPMPCSRLLP | 0.002 |
| 4 | MPCSRLLPSL | 0.002 |
| 10 | LPSLRCSLHS | 0.000 |
| 3 | PMPCSRLLPS | 0.000 |
| 6 | CSRLLPSLRC | 0.000 |
| 1 | AGPMPCSRLL | 0.000 |
| 7 | SRLLPSLRCS | 0.000 |

[1023] TABLE XV

V20-HLA-A1101-10MERS-PSCA
Each peptide is a portion of SEQ ID NO: 8;
each start position is specified, the
length of peptide is 10 amino acids, and
the end position for each peptide is the
start position plus nine.

| | | |
|---|---|---|
| START | SUBSEQUENCE | SCORE |

| | | |
|---|---|---|
| 2 | CCSGDPASSR | 0.040 |
| 6 | DPASSRLWGA | 0.001 |
| 8 | ASSRLWGAPL | 0.000 |
| 1 | ACCSGDPASS | 0.000 |
| 3 | CSGDPASSRL | 0.000 |
| 5 | GDPASSRLWG | 0.000 |
| 10 | SRLWGAPLQP | 0.000 |
| 4 | SGDPASSRLW | 0.000 |
| 7 | PASSRLWGAP | 0.000 |
| 9 | SSRLWGAPLQ | 0.000 |

[1024] TABLE XV

V21-HLA-A1101-10MERS-PSCA
Each peptide is a portion of SEQ ID NO: 8;
each start position is specified, the
length of peptide is 10 amino acids, and
the end position for each peptide is the
start position plus nine.

| | | |
|---|---|---|
| START | SUBSEQUENCE | SCORE |

| | | |
|---|---|---|
| 8 | LTDPAQWEPV | 0.010 |
| 5 | VPLLTDPAQW | 0.003 |
| 4 | SVPLLTDPAQ | 0.002 |
| 7 | LLTDPAQWEP | 0.001 |
| 10 | DPAQWEPVLV | 0.001 |
| 3 | ASVPLLTDPA | 0.000 |
| 9 | TDPAQWEPVL | 0.000 |
| 2 | QASVPLLTDP | 0.000 |
| 1 | PQASVPLLTD | 0.000 |
| 6 | PLLTDPAQWE | 0.000 |

[1025] TABLE XV

V21 & V22-HLA-A1101-10MERS-PSCA
Each peptide is a portion of SEQ ID NO: 8;
each start position is specified, the
length of peptide is 10 amino acids, and
the end position for each peptide is the
start position plus nine.

| | | |
|---|---|---|
| START | SUBSEQUENCE | SCORE |

| | | |
|---|---|---|
| 7 | LTDPAQWEPV | 0.010 |
| 3 | SVPLLTDLAQ | 0.004 |
| 4 | VPLLTDLAQW | 0.003 |
| 1 | QASVPLLTDL | 0.002 |
| 9 | DLAQWEPVLV | 0.001 |
| 6 | LLTDLAQWEP | 0.001 |
| 8 | TDLAQWEPVL | 0.000 |
| 2 | ASVPLLTDLA | 0.000 |
| 5 | PLLTDLAQWE | 0.000 |

[1026] TABLE XV

V22-HLA-A1101-10MERS-PSCA
Each peptide is a portion of SEQ ID NO: 8;
each start position is specified, the
length of peptide is 10 amino acids, and
the end position for each peptide is the
start position plus nine.

| | | |
|---|---|---|
| START | SUBSEQUENCE | SCORE |

| | | |
|---|---|---|
| 7 | LTHLAQWEPV | 0.010 |
| 9 | HLAQWEPVLV | 0.004 |
| 3 | SVPLLTHLAQ | 0.004 |
| 4 | VPLLTHLAQW | 0.003 |
| 1 | QASVPLLTHL | 0.002 |
| 6 | LLTHLAQWEP | 0.001 |
| 10 | LAQWEPVLVP | 0.000 |
| 8 | THLAQWEPVL | 0.000 |
| 2 | ASVPLLTHLA | 0.000 |
| 5 | PLLTHLAQWE | 0.000 |

[1027] TABLE XV

V24-HLA-A1101-10MERS-PSCA
Each peptide is a portion of SEQ ID NO: 8;
each start position is specified, the
length of peptide is 10 amino acids, and
the end position for each peptide is the
start position plus nine.

| | | |
|---|---|---|
| START | SUBSEQUENCE | SCORE |

| | | |
|---|---|---|
| 5 | TMYVCTPVPH | 0.008 |
| 3 | SLTMYVCTPV | 0.004 |
| 10 | TPVPHPDPPM | 0.003 |
| 4 | LTMYVCTPVP | 0.002 |
| 7 | YVCTPVPHPD | 0.002 |
| 9 | CTPVPHPDPP | 0.001 |
| 6 | MYVCTPVPHP | 0.001 |
| 8 | VCTPVPHPDP | 0.000 |
| 1 | NASLTMYVCT | 0.000 |
| 2 | ASLTMYVCTP | 0.000 |

[1028] TABLE XV

V25-HLA-A1101-10MERS-PSCA
Each peptide is a portion of SEQ ID NO: 8;
each start position is specified, the
length of peptide is 10 amino acids, and
the end position for each peptide is the
start position plus nine.

| | | |
|---|---|---|
| START | SUBSEQUENCE | SCORE |

| | | |
|---|---|---|
| 3 | RTPTRQISSI | 0.030 |
| 7 | RQISSIDTDP | 0.003 |
| 8 | QISSIDTDPP | 0.000 |
| 9 | ISSIDTDPPA | 0.000 |
| 5 | PTRQISSIDT | 0.000 |
| 4 | TPTRQISSID | 0.000 |
| 2 | SRTPTRQISS | 0.000 |
| 10 | SSIDTDPPAD | 0.000 |
| 6 | TRQISSIDTD | 0.000 |
| 1 | LSRTPTRQIS | 0.000 |

[1029] TABLE XV

V25 & 26-HLA-A1101-10MERS-PSCA
Each peptide is a portion of SEQ ID NO: 8;
each start position is specified, the
length of peptide is 10 amino acids, and
the end position for each peptide is the
start position plus nine.

| | | |
|---|---|---|
| START | SUBSEQUENCE | SCORE |

| | | |
|---|---|---|
| 1 | RTPTRQISSS | 0.030 |
| 5 | RQISSSDTDP | 0.003 |
| 6 | QISSSDTDPP | 0.000 |
| 7 | ISSSDTDPPA | 0.000 |
| 2 | TPTRQISSSD | 0.000 |
| 3 | PTRQISSSDT | 0.000 |
| 4 | TRQISSSDTD | 0.000 |
| 8 | SSSDTDPPAD | 0.000 |

[1030] TABLE XV

V25-HLA-A1101-10MERS-PSCA
Each peptide is a portion of SEQ ID NO: 8;
each start position is specified, the
length of peptide is 10 amino acids, and
the end position for each peptide is the
start position plus nine.

| | | |
|---|---|---|
| START | SUBSEQUENCE | SCORE |

| | | |
|---|---|---|
| 1 | RTPTRQISSS | 0.003 |
| 5 | RQISSSDTDP | 0.003 |
| 6 | QISSSDTDPP | 0.000 |
| 7 | ISSSDTDPPA | 0.000 |
| 2 | TPTRQISSSD | 0.000 |
| 3 | PTRQISSSDT | 0.000 |
| 4 | TRQISSSDTD | 0.000 |
| 8 | SSSDTDPPAD | 0.000 |

[1031] TABLE XV

V27-HLA-A1101-10MERS-PSCA
Each peptide is a portion of SEQ ID NO: 8;
each start position is specified, the
length of peptide is 10 amino acids, and
the end position for each peptide is the
start position plus nine.

| | | |
|---|---|---|
| START | SUBSEQUENCE | SCORE |

| | | |
|---|---|---|
| 2 | SRGQALRRAQ | 0.000 |
| 1 | PSRGQALRRA | 0.000 |

[1032] TABLE XVI

V1-HLA-A24-9MERS-
PSCA
Each peptide is a portion of SEQ
ID NO: 2; each start position is
specified, the length of peptide is 9
amino acids, and the end position
for each peptide is the start
position plus eight.

| | | |
|---|---|---|
| START | SUBSEQUENCE | SCORE |

| | | |
|---|---|---|
| 76 | DYYVGKKNI | 50.000 |
| 77 | YYVGKKNIT | 9.000 |
| 36 | LQVENCTQL | 7.200 |
| 108 | ALLPALGLL | 7.200 |
| 99 | ALQPAAAIL | 7.200 |
| 109 | LLPALGLLL | 7.200 |
| 14 | ALQPGTALL | 7.200 |
| 105 | AILALLPAL | 7.200 |
| 60 | TVISKGCSL | 6.000 |
| 23 | CYSCKAQVS | 6.000 |
| 7 | ALLMAGLAL | 6.000 |
| 115 | LLLWGPGQL | 6.000 |
| 28 | AQVSNEDCL | 6.000 |
| 13 | LALQPGTAL | 6.000 |
| 107 | LALLPALGL | 6.000 |
| 5 | LLALLMAGL | 4.800 |
| 101 | QPAAAILAL | 4.000 |
| 83 | NITCCDTDL | 4.000 |
| 50 | TARIRAVGL | 4.000 |
| 92 | CNASGAHAL | 4.000 |
| 54 | RAVGLLTVI | 3.600 |
| 2 | KAVLLALLM | 1.800 |
| 98 | HALQPAAAI | 1.500 |
| 51 | ARIRAVGLL | 0.600 |
| 102 | PAAAILALL | 0.560 |
| 1 | MKAVLLALL | 0.480 |
| 27 | KAQVSNEDC | 0.300 |
| 52 | RIRAVGLLT | 0.280 |
| 34 | DCLQVENCT | 0.252 |
| 69 | NCVDDSQDY | 0.216 |
| 41 | CTQLGEQCW | 0.180 |
| 30 | VSNEDCLQV | 0.180 |
| 11 | AGLALQPGT | 0.180 |
| 20 | ALLCYSCKA | 0.165 |
| 45 | GEQCWTARI | 0.150 |
| 6 | LALLMAGLA | 0.150 |
| 42 | TQLGEQCWT | 0.150 |
| 3 | AVLLALLMA | 0.150 |
| 59 | LTVISKGCS | 0.150 |
| 100 | LQPAAAILA | 0.150 |
| 15 | LQPGTALLC | 0.150 |
| 66 | CSLNCVDDS | 0.150 |
| 104 | TQLGEQCWT | 0.150 |
| 91 | LCNASGAHA | 0.150 |
| 58 | LLTVISKGC | 0.140 |
| 55 | AVGLLTVIS | 0.120 |
| 85 | TCCDTDLCN | 0.120 |
| 43 | QLGEQCWTA | 0.120 |
| 18 | GTASSCYSC | 0.120 |
| 40 | NCTQLGEQC | 0.120 |
| 96 | GAHALQPAA | 0.120 |
| 70 | CVDDSQDYY | 0.120 |
| 95 | SGAHALQPA | 0.120 |
| 22 | LCYSCKAQV | 0.100 |
| 61 | VISKGCSLN | 0.100 |
| 47 | QCWTARIRA | 0.100 |
| 16 | QPGTALLCY | 0.100 |
| 78 | YVGKKNITC | 0.100 |
| 84 | ITCCDTDLC | 0.100 |
| 86 | CCDTDLCNA | 0.100 |
| 24 | YSCKAQVSN | 0.100 |
| 48 | CWTARIRAV | 0.100 |
| 110 | LPALGLLLW | 0.100 |
| 62 | ISKGCSLNC | 0.100 |
| 79 | VGKKNITCC | 0.100 |
| 12 | GLALQPGTA | 0.100 |
| 82 | KNITCCDTD | 0.030 |
| 81 | KKNITCCDT | 0.030 |
| 64 | KGCSLNCVD | 0.024 |
| 57 | GLLTVISKG | 0.023 |
| 31 | SNEDCLQVE | 0.022 |
| 67 | SLNCVDDSQ | 0.021 |
| 113 | LGLLLWGPG | 0.018 |
| 37 | QVENCTQLG | 0.018 |
| 4 | VLLALLMAG | 0.018 |
| 73 | DSQDYYVGK | 0.018 |
| 87 | CDTDLCNAS | 0.017 |
| 75 | QDYYVGKKN | 0.015 |
| 44 | LGEQCWTAR | 0.015 |
| 19 | TALLCYSCK | 0.015 |
| 114 | GLLLWGPGQ | 0.015 |
| 89 | TDLCNASGA | 0.015 |
| 8 | LLMAGLALQ | 0.015 |
| 56 | VGLLTVISK | 0.015 |
| 35 | CLQVENCTQ | 0.015 |
| 49 | WTARIRAVG | 0.014 |
| 32 | NEDCLQVEN | 0.013 |
| 103 | AAAILALLP | 0.012 |
| 112 | ALGLLLWGP | 0.012 |
| 63 | SKGCSLNCV | 0.012 |
| 9 | LMAGLALQP | 0.012 |
| 10 | MAGLALQPG | 0.012 |
| 17 | PGTALLCYS | 0.012 |
| 106 | ILALLPALG | 0.012 |
| 74 | SQDYYVGKK | 0.011 |
| 39 | ENCTQLGEQ | 0.011 |
| 29 | QVSNEDCLQ | 0.010 |
| 21 | LLCYSCKAQ | 0.010 |
| 97 | AHALQPAAA | 0.010 |
| 25 | SCKAQVSNE | 0.010 |

[1033] TABLE XVI

V4-HLA-A24-9MERS-PSCA
Each peptide is a portion of SEQ ID NO: 8;
each start position is specified, the
length of peptide is 9 amino acids, and
the end position for each peptide is the
start position plus eight.

| | | |
|---|---|---|
| START | SUBSEQUENCE | SCORE |

| | | |
|---|---|---|
| 51 | SYRLWGAPL | 200.000 |
| 143 | AFSTLNPVL | 24.000 |
| 146 | TLNPVLRHL | 10.080 |
| 32 | LPPSLRCSL | 7.200 |
| 65 | VVPQASVPL | 6.000 |
| 66 | VPQASVPLL | 6.000 |
| 24 | AGPMPCSRL | 6.000 |
| 55 | WGAPLQPTL | 5.760 |
| 165 | IYDLSQVWS | 5.000 |
| 46 | SGDPASYRL | 4.800 |
| 160 | FPAHPIYDL | 4.000 |
| 76 | HPAQWEPVL | 4.000 |
| 147 | LNPVLRHLF | 3.600 |
| 136 | CCCFHGPAF | 2.000 |
| 114 | TPTRQIGSI | 1.000 |
| 111 | LSRTPTRQI | 1.000 |
| 154 | LFPQEAFPA | 0.750 |
| 96 | MYVCAPVPH | 0.750 |
| 177 | PAPSRGQAL | 0.720 |
| 152 | RHLFPQEAF | 0.600 |
| 139 | FHGPAFSTL | 0.576 |
| 138 | CFHGPAFST | 0.500 |
| 19 | TCATPAGPM | 0.500 |
| 28 | PCSRLPPSL | 0.480 |
| 127 | PADGPSNPL | 0.480 |
| 131 | PSNPLCCCF | 0.432 |
| 31 | RLPPSLRCS | 0.360 |
| 113 | RTPTRQIGS | 0.300 |
| 14 | RAVTPTCAT | 0.300 |
| 94 | LTMYVCAPV | 0.210 |
| 11 | RTSRAVTPT | 0.200 |
| 4 | RTTTWARRT | 0.200 |
| 37 | RCSLHSACC | 0.200 |
| 84 | LVPEAHPNA | 0.180 |
| 83 | VLVPEAHPN | 0.180 |
| 85 | VPEAHPNAS | 0.180 |
| 70 | SVPLLTHPA | 0.180 |
| 120 | GSIDTDPPA | 0.180 |
| 62 | TLGVVPQAS | 0.168 |
| 57 | APLQPTLGV | 0.150 |
| 21 | ATPAGPMPC | 0.150 |
| 168 | LSQVWSVVS | 0.150 |
| 63 | LGVVPQASV | 0.150 |
| 172 | WSVVSPAPS | 0.150 |
| 163 | HPIYDLSQV | 0.150 |
| 129 | DGPSNPLCC | 0.150 |
| 140 | HGPAFSTLN | 0.150 |
| 106 | DPPMALSRT | 0.150 |
| 89 | HPNASLTMY | 0.150 |
| 125 | DPPADGPSN | 0.150 |
| 38 | CSLHSACCS | 0.150 |
| 16 | VTPTCATPA | 0.150 |
| 92 | ASLTMYVCA | 0.150 |
| 170 | QVWSVVSPA | 0.140 |
| 167 | DLSQVWSVV | 0.140 |
| 12 | TSRAVTPTC | 0.140 |
| 87 | EAHPNASLT | 0.120 |
| 104 | HPDPPMALS | 0.120 |
| 158 | EAFPAHPIY | 0.120 |
| 176 | SPAPSRGQA | 0.120 |
| 102 | VPHPDPPMA | 0.120 |
| 54 | LWGAPLQPT | 0.120 |
| 35 | SLRCSLHSA | 0.100 |
| 27 | MPCSRLPPS | 0.100 |
| 7 | TWARRTSRA | 0.100 |
| 42 | SACCSGDPA | 0.100 |
| 91 | NASLTMYVC | 0.100 |
| 22 | TPAGPMPCS | 0.100 |
| 8 | WARRTSRAV | 0.100 |
| 43 | ACCSGDPAS | 0.100 |
| 5 | TTTWARRTS | 0.100 |
| 1 | MTHRTTTWA | 0.100 |
| 130 | GPSNPLCCC | 0.100 |
| 44 | CCSGDPASY | 0.100 |
| 135 | LCCCFHGPA | 0.100 |
| 137 | CCFHGPAFS | 0.100 |
| 157 | QEAFPAHPI | 0.100 |
| 88 | AHPNASLTM | 0.075 |
| 159 | AFPAHPIYD | 0.075 |
| 101 | PVPHPDPPM | 0.075 |
| 103 | PHPDPPMAL | 0.072 |
| 86 | PEAHPNASL | 0.040 |
| 181 | RGQALRRAR | 0.036 |
| 117 | RQIGSIDTD | 0.030 |
| 79 | QWEPVLVPE | 0.025 |
| 69 | ASVPLLTHP | 0.022 |
| 155 | FPQEAFPAH | 0.022 |
| 61 | PTLGVVPQA | 0.021 |
| 81 | EPVLVPEAH | 0.021 |
| 53 | RLWGAPLQP | 0.020 |
| 80 | WEPVLVPEA | 0.020 |
| 124 | TDPPADGPS | 0.018 |
| 58 | PLQPTLGVV | 0.018 |
| 30 | SRLPPSLRC | 0.018 |
| 25 | GPMPCSRLP | 0.018 |
| 59 | LQPTLGVVP | 0.018 |
| 64 | GVVPQASVP | 0.018 |
| 100 | APVPHPDPP | 0.018 |
| 164 | PIYDLSQVW | 0.017 |
| 98 | VCAPVPHPD | 0.017 |

[1034] TABLE XVI

V19-HLA-A24-9MERS-PSCA
Each peptide is a portion of SEQ ID NO: 8;
each start position is specified, the
length of peptide is 9 amino acids, and
the end position for each peptide is the
start position plus eight.

| | | |
|---|---|---|
| START | SUBSEQUENCE | SCORE |

| | | |
|---|---|---|
| 1 | GPMPCSRLL | 7.200 |
| 8 | LLPSLRCSL | 7.200 |
| 4 | PCSRLLPSL | 0.480 |
| 7 | RLLPSLRCS | 0.360 |
| 3 | MPCSRLLPS | 0.100 |
| 6 | SRLLPSLRC | 0.015 |
| 5 | CSRLLPSLR | 0.012 |
| 9 | LPSLRCSLH | 0.010 |
| 2 | PMPCSRLLP | 0.002 |

[1035] TABLE XVI

V20-HLA-A24-9MERS-PSCA
Each peptide is a portion of SEQ ID NO: 8;
each start position is specified, the
length of peptide is 9 amino acids, and
the end position for each peptide is the
start position plus eight.

| | | |
|---|---|---|
| START | SUBSEQUENCE | SCORE |

| | | |
|---|---|---|
| 3 | SGDPASSRL | 4.800 |
| 8 | SSRLWGAPL | 4.000 |
| 1 | CCSGDPASS | 0.100 |
| 4 | GDPASSRLW | 0.015 |
| 7 | ASSRLWGAP | 0.012 |
| 2 | CSGDPASSR | 0.012 |
| 6 | PASSRLWGA | 0.010 |
| 5 | DPASSRLWG | 0.010 |
| 9 | SRLWGAPLQ | 0.002 |

[1036] TABLE XVI

V21-HLA-A24-9MERS-PSCA
Each peptide is a portion of SEQ ID NO: 8;
each start position is specified, the
length of peptide is 9 amino acids, and
the end position for each peptide is the
start position plus eight.

| | | |
|---|---|---|
| START | SUBSEQUENCE | SCORE |

| | | |
|---|---|---|
| 9 | DPAQWEPVL | 4.000 |
| 3 | SVPLLTDPA | 0.180 |
| 2 | ASVPLLTDP | 0.022 |
| 8 | TDPAQWEPV | 0.015 |
| 5 | PLLTDPAQW | 0.015 |
| 4 | VPLLTDPAQ | 0.015 |
| 6 | LLTDPAQWE | 0.014 |
| 7 | LTDPAQWEP | 0.013 |
| 1 | QASVPLLTD | 0.010 |

[1037] TABLE XVI

V21 & 22-HLA-A24-9MERS-PSCA
Each peptide is a portion of SEQ ID NO: 8;
each start position is specified, the
length of peptide is 9 amino acids, and
the end position for each peptide is the
start position plus eight.

| | | |
|---|---|---|
| START | SUBSEQUENCE | SCORE |

| | | |
|---|---|---|
| 1 | ASVPLLTDL | 8.640 |
| 8 | DLAQWEPVL | 4.000 |
| 2 | SVPLLTDLA | 0.180 |
| 5 | LLTDLAQWE | 0.017 |
| 7 | TDLAQWEPV | 0.015 |
| 3 | VPLLTDLAQ | 0.015 |
| 4 | PLLTDLAQW | 0.015 |
| 6 | LTDLAQWEP | 0.011 |

[1038] TABLE XVI

V22-HLA-A24-9MERS-PSCA
Each peptide is a portion of SEQ ID NO: 8;
each start position is specified, the
length of peptide is 9 amino acids, and
the end position for each peptide is the
start position plus eight.

| | | |
|---|---|---|
| START | SUBSEQUENCE | SCORE |

| | | |
|---|---|---|
| 1 | ASVPLLTHL | 8.640 |
| 8 | HLAQWEPVL | 4.000 |
| 2 | SVPLLTHLA | 0.180 |
| 9 | LAQWEPVLV | 0.150 |
| 3 | VPLLTHLAQ | 0.015 |
| 4 | PLLTHLAQW | 0.015 |
| 7 | THLAQWEPV | 0.015 |
| 5 | LLTHLAQWE | 0.014 |
| 6 | LTHLAQWEP | 0.011 |

[1039] TABLE XVI

V24-HLA-A24-9MERS-PSCA
Each peptide is a portion of SEQ ID NO: 8;
each start position is specified, the
length of peptide is 9 amino acids, and
the end position for each peptide is the
start position plus eight.

| | | |
|---|---|---|
| START | SUBSEQUENCE | SCORE |

| | | |
|---|---|---|
| 5 | MYVCTPVPH | 0.750 |
| 3 | LTMYVCTPV | 0.210 |
| 1 | ASLTMYVCT | 0.150 |
| 7 | VCTPVPHPD | 0.017 |
| 8 | CTPVPHPDP | 0.015 |
| 4 | TMYVCTPVP | 0.010 |
| 2 | SLTMYVCTP | 0.010 |
| 6 | YVCTPVPHP | 0.010 |

[1040] TABLE XVI

V25-HLA-A24-9MERS-PSCA
Each peptide is a portion of SEQ ID NO: 8;
each start position is specified, the
length of peptide is 9 amino acids, and
the end position for each peptide is the
start position plus eight.

| | | |
|---|---|---|
| START | SUBSEQUENCE | SCORE |

| | | |
|---|---|---|
| 3 | TPTRQISSI | 1.000 |
| 2 | RTPTRQISS | 0.300 |
| 9 | SSIDTDPPA | 0.180 |
| 6 | RQISSIDTD | 0.030 |
| 5 | TRQISSIDT | 0.015 |
| 1 | SRTPTRQIS | 0.014 |
| 7 | QISSIDTDP | 0.014 |
| 8 | ISSIDTDPP | 0.010 |
| 4 | PTRQISSID | 0.001 |

[1041] TABLE XVI

V25 & 26-HLA-A24-9MERS-PSCA
Each peptide is a portion of SEQ ID NO: 8;
each start position is specified, the
length of peptide is 9 amino acids, and
the end position for each peptide is the
start position plus eight.

| | | |
|---|---|---|
| START | SUBSEQUENCE | SCORE |

| | | |
|---|---|---|
| 7 | SSSDTDPPA | 0.012 |
| 1 | TPTRQISSS | 0.100 |
| 4 | RQISSSDTD | 0.030 |
| 3 | TRQISSSDT | 0.015 |
| 6 | ISSSDTDPP | 0.010 |
| 5 | QISSSDTDP | 0.010 |
| 2 | PTRQISSSD | 0.001 |

[1042] TABLE XVI

V26-HLA-A24-9MERS-PSCA
Each peptide is a portion of SEQ ID NO: 8;
each start position is specified, the
length of peptide is 9 amino acids, and
the end position for each peptide is the
start position plus eight.

| | | |
|---|---|---|
| START | SUBSEQUENCE | SCORE |

| | | |
|---|---|---|
| 7 | GSSDTDPPA | 0.120 |
| 1 | TPTRQIGSS | 0.100 |
| 4 | RQIGSSDTD | 0.030 |
| 3 | TRQIGSSDT | 0.015 |
| 8 | SSDTDPPAD | 0.010 |
| 6 | IGSSDTDPP | 0.010 |
| 5 | QIGSSDTDP | 0.010 |
| 2 | PTRQIGSSD | 0.001 |
| 9 | SDTDPPADG | 0.001 |

[1043] TABLE XVI

V27-HLA-A24-9MERS-PSCA
Each peptide is a portion of SEQ ID NO: 8;
each start position is specified, the
length of peptide is 9 amino acids, and
the end position for each peptide is the
start position plus eight.

| | | |
|---|---|---|
| START | SUBSEQUENCE | SCORE |

| | | |
|---|---|---|
| 2 | RGQALRRAQ | 0.036 |
| 1 | SRGQALRRA | 0.010 |

[1044] TABLE XVII

V1-HLA-A24-10MERS-PSCA
Each peptide is a portion of SEQ ID NO: 2;
each start position is specified, the
length of peptide is 10 amino acids, and
the end position for each peptide is the
start position plus nine.

| | | |
|---|---|---|
| START | SUBSEQUENCE | SCORE |

| | | |
|---|---|---|
| 82 | KNITCCDTDL | 12.000 |
| 27 | KAQVSNEDCL | 12.000 |
| 108 | ALLPALGLLL | 8.640 |
| 77 | YYVGKKNITC | 7.500 |
| 4 | VLLALLMAGL | 7.200 |
| 104 | AAILALLPAL | 7.200 |
| 98 | HALQPAAAIL | 6.000 |
| 76 | DYYVGKKNIT | 6.000 |
| 6 | LALLMAGLAL | 6.000 |
| 91 | LCNASGAHAL | 6.000 |
| 35 | CLQVENCTQL | 6.000 |
| 100 | LQPAAAILAL | 6.000 |
| 59 | LTVISKGCSL | 6.000 |
| 13 | LALQPGTALL | 6.000 |
| 114 | GLLLWGPGQL | 6.000 |
| 107 | LALLPALGLL | 6.000 |
| 101 | QPAAAILALL | 5.600 |
| 23 | CYSCKAQVSN | 5.000 |
| 106 | ILALLPALGL | 4.000 |
| 50 | TARIRAVGLL | 4.000 |
| 49 | WTARIRAVGL | 4.000 |
| 12 | GLALQPGTAL | 4.000 |
| 44 | LGEQCWTARI | 1.500 |
| 54 | RAVGLLTVIS | 0.360 |
| 2 | KAVLLALLMA | 0.300 |
| 31 | SNEDCLQVEN | 0.238 |
| 57 | GLLTVISKGC | 0.210 |
| 52 | RIRAVGLLTV | 0.200 |
| 99 | ALQPAAAILA | 0.180 |
| 69 | NCVDDSQDYY | 0.180 |
| 14 | ALQPGTALLC | 0.180 |
| 19 | TALLCYSCKA | 0.165 |
| 74 | SQDYYVGKKN | 0.154 |
| 109 | LLPALGLLLW | 0.150 |
| 60 | TVISKGCSLN | 0.150 |
| 15 | LQPGTALLCY | 0.150 |
| 42 | TQLGEQCWTA | 0.150 |
| 41 | CTQLGEQCWT | 0.150 |
| 11 | AGLALQPGTA | 0.150 |
| 86 | CCDTDLCNAS | 0.144 |
| 85 | TCCDTDLCNA | 0.120 |
| 62 | ISKGCSLNCV | 0.120 |
| 70 | CVDDSQDYYV | 0.120 |
| 39 | ENCTQLGEQC | 0.120 |
| 68 | LNCVDDSQDY | 0.120 |
| 40 | NCTQLGEQCW | 0.120 |
| 53 | IRAVGLLTVI | 0.120 |
| 94 | ASGAHALQPA | 0.120 |
| 95 | SGAHALQPAA | 0.120 |
| 22 | LCYSCKAQVS | 0.120 |
| 16 | QPGTALLCYS | 0.120 |
| 10 | MAGLALQPGT | 0.120 |
| 47 | QCWTARIRAV | 0.100 |
| 61 | VISKGCSLNC | 0.100 |
| 97 | AHALQPAAAI | 0.100 |
| 88 | DTDLCNASGA | 0.100 |
| 78 | YVGKKNITCC | 0.100 |
| 5 | LLALLMAGLA | 0.100 |
| 75 | QDYYVGKKNI | 0.100 |
| 84 | ITCCDTDLCN | 0.100 |
| 83 | NITCCDTDLC | 0.100 |
| 90 | DLCNASGAHA | 0.100 |
| 58 | LLTVISKGCS | 0.100 |
| 65 | GCSLNCVDDS | 0.100 |
| 103 | AAAILALLPA | 0.100 |
| 21 | LLCYSCKAQV | 0.100 |
| 46 | EQCWTARIRA | 0.100 |
| 96 | GAHALQPAAA | 0.100 |
| 29 | QVSNEDCLQV | 0.100 |
| 1 | MKAVLLALLM | 0.060 |
| 56 | VGLLTVISKG | 0.023 |
| 36 | LQVENCTQLG | 0.022 |
| 30 | VSNEDCLQVE | 0.022 |
| 51 | ARIRAVGLLT | 0.021 |
| 66 | CSLNCVDDSQ | 0.021 |
| 64 | KGCSLNCVDD | 0.020 |
| 73 | DSQDYYVGKK | 0.020 |
| 25 | SCKAQVSNED | 0.018 |
| 8 | LLMAGLALQP | 0.018 |
| 3 | AVLLALLMAG | 0.018 |
| 105 | AILALLPALG | 0.018 |
| 33 | EDCLQVENCT | 0.017 |
| 20 | ALLCYSCKAQ | 0.015 |
| 28 | AQVSNEDCLQ | 0.015 |
| 67 | SLNCVDDSQD | 0.015 |
| 113 | LGLLLWGPGQ | 0.015 |
| 34 | DCLQVENCTQ | 0.015 |
| 37 | QVENCTQLGE | 0.015 |
| 7 | ALLMAGLALQ | 0.015 |
| 48 | CWTARIRAVG | 0.014 |
| 79 | VGKKNITCCD | 0.014 |
| 112 | ALGLLLWGPG | 0.012 |
| 17 | PGTALLCYSC | 0.012 |
| 43 | QLGEQCWTAR | 0.012 |
| 9 | LMAGLALQPG | 0.012 |
| 110 | LPALGLLLWG | 0.012 |
| 32 | NEDCLQVENC | 0.010 |
| 93 | NASGAHALQP | 0.010 |
| 92 | CNASGAHALQ | 0.010 |
| 80 | GKKNITCCDT | 0.010 |

[1045] TABLE XVII

V4-HLA-A24-10MERS-PSCA
Each peptide is a portion of SEQ ID NO: 8;
each start position is specified, the
length of peptide is 10 amino acids, and
the end position for each peptide is the
start position plus nine.

| | | |
|---|---|---|
| START | SUBSEQUENCE | SCORE |

| | | |
|---|---|---|
| 159 | AFPAHPIYDL | 30.000 |
| 138 | CFHGPAFSTL | 24.000 |
| 31 | RLPPSLRCSL | 17.280 |
| 145 | STLNPVLRHL | 8.400 |
| 64 | GVVPQASVPL | 7.200 |
| 85 | VPEAHPNASL | 6.000 |
| 65 | VVPQASVPLL | 6.000 |
| 176 | SPAPSRGQAL | 5.760 |
| 165 | IYDLSQVWSV | 5.000 |
| 102 | VPHPDPPMAL | 4.800 |
| 27 | MPCSRLPPSL | 4.800 |
| 45 | CSGDPASYRL | 4.800 |
| 54 | LWGAPLQPTL | 4.800 |
| 146 | TLNPVLRHLF | 4.320 |
| 50 | ASYRLWGAPL | 4.000 |
| 113 | RTPTRQIGSI | 3.000 |
| 130 | GPSNPLCCCF | 2.400 |
| 135 | LCCCFHGPAF | 2.000 |
| 110 | ALSRTPTRQI | 1.000 |
| 100 | APVPHPDPPM | 0.900 |
| 96 | MYVCAPVPHP | 0.750 |
| 75 | THPAQWEPVL | 0.600 |
| 87 | EAHPNASLTM | 0.600 |
| 126 | PPADGPSNPL | 0.576 |
| 51 | SYRLWGAPLQ | 0.500 |
| 142 | PAFSTLNPVL | 0.480 |
| 23 | PAGPMPCSRL | 0.480 |
| 11 | RTSRAVTPTC | 0.280 |
| 53 | RLWGAPLQPT | 0.240 |
| 79 | QWEPVLVPEA | 0.238 |
| 84 | LVPEAHPNAS | 0.216 |
| 69 | ASVPLLTHPA | 0.216 |
| 163 | HPIYDLSQVW | 0.216 |
| 66 | VPQASVPLLT | 0.210 |
| 169 | SQVWSVVSPA | 0.210 |
| 4 | RTTTWARRTS | 0.200 |
| 37 | RCSLHSACCS | 0.200 |
| 151 | LRHLFPQEAF | 0.200 |
| 83 | VLVPEAHPNA | 0.180 |
| 89 | HPNASLTMYV | 0.180 |
| 71 | VPLLTHPAQW | 0.150 |
| 56 | GAPLQPTLGV | 0.150 |
| 156 | PQEAFPAHPI | 0.150 |
| 57 | APLQPTLGVV | 0.150 |
| 129 | DGPSNPLCCC | 0.150 |
| 21 | ATPAGPMPCS | 0.150 |
| 175 | VSPAPSRGQA | 0.150 |
| 60 | QPTLGVVPQA | 0.140 |
| 93 | SLTMYVCAPV | 0.140 |
| 160 | FPAHPIYDLS | 0.140 |
| 150 | VLRHLFPQEA | 0.132 |
| 46 | SGDPASYRLW | 0.120 |
| 123 | DTDPPADGPS | 0.120 |
| 35 | SLRCSLHSAC | 0.120 |
| 15 | AVTPTCATPA | 0.120 |
| 20 | CATPAGPMPC | 0.120 |
| 141 | GPAFSTLNPV | 0.120 |
| 74 | LTHPAQWEPV | 0.120 |
| 153 | HLFPQEAFPA | 0.120 |
| 8 | WARRTSRAVT | 0.100 |
| 136 | CCCFHGPAFS | 0.100 |
| 42 | SACCSGDPAS | 0.100 |
| 171 | VWSVVSPAPS | 0.100 |
| 76 | HPAQWEPVLV | 0.100 |
| 6 | TTWARRTSRA | 0.100 |
| 167 | DLSQVWSVVS | 0.100 |
| 29 | CSRLPPSLRC | 0.100 |
| 41 | HSACCSGDPA | 0.100 |
| 48 | DPASYRLWGA | 0.100 |
| 119 | IGSIDTDPPA | 0.100 |
| 43 | ACCSGDPASY | 0.100 |
| 62 | TLGVVPQASV | 0.100 |
| 137 | CCFHGPAFST | 0.100 |
| 12 | TSRAVTPTCA | 0.100 |
| 91 | NASLTMYVCA | 0.100 |
| 7 | TWARRTSRAV | 0.100 |
| 154 | LFPQEAFPAH | 0.090 |
| 18 | PTCATPAGPM | 0.050 |
| 143 | AFSTLNPVLR | 0.050 |
| 117 | RQIGSIDTDP | 0.042 |
| 14 | RAVTPTCATP | 0.030 |
| 61 | PTLGVVPQAS | 0.025 |
| 166 | YDLSQVWSVV | 0.021 |
| 10 | RRTSRAVTPT | 0.020 |
| 124 | TDPPADGPSN | 0.018 |
| 30 | SRLPPSLRCS | 0.018 |
| 25 | GPMPCSRLPP | 0.018 |
| 155 | FPQEAFPAHP | 0.018 |
| 106 | DPPMALSRTP | 0.018 |
| 133 | NPLCCCFHGP | 0.018 |
| 120 | GSIDTDPPAD | 0.018 |
| 78 | AQWEPVLVPE | 0.017 |
| 101 | PVPHPPPPMA | 0.015 |
| 24 | AGPMPCSRLP | 0.015 |
| 94 | LTMYVCAPVP | 0.015 |
| 99 | CAPVPHPDPP | 0.015 |
| 140 | HGPAFSTLNP | 0.015 |
| 34 | PSLRCSLHSA | 0.015 |
| 107 | PPMALSRTPT | 0.015 |
| 147 | LNPVLRHLFP | 0.015 |

[1046] TABLE XVII

V19-HLA-A24-
10MERS-PSCA
Each peptide is a portion of SEQ
ID NO: 8; each start position is
specified, the length of peptide is
10 amino acids, and the end
position for each pepfide is the
start position plus nine.

| | | |
|---|---|---|
| START | SUBSEQUENCE | SCORE |

| | | |
|---|---|---|
| 8 | RLLPSLRCSL | 17.280 |
| 1 | AGPMPCSRLL | 6.000 |
| 4 | MPCSRLLPSL | 4.800 |
| 6 | CSRLLPSLRC | 0.100 |
| 10 | LPSLRCSLHS | 0.100 |
| 2 | GPMPCSRLLP | 0.018 |
| 7 | SRLLPSLRCS | 0.015 |
| 3 | PMPCSRLLPS | 0.015 |
| 9 | LLPSLRCSLH | 0.015 |
| 5 | PCSRLLPSLR | 0.001 |

[1047] TABLE XVII

V20-HLA-A24-10MERS-PSCA
Each peptide is a portion of SEQ ID NO: 8;
each start position is specified, the
length of peptide is 10 amino acids, and
the end position for each peptide is the
start position plus nine.

| | | |
|---|---|---|
| START | SUBSEQUENCE | SCORE |

| | | |
|---|---|---|
| 3 | CSGDPASSRL | 4.800 |
| 8 | ASSRLWGAPL | 4.000 |
| 4 | SGDPASSRLW | 0.120 |
| 6 | DPASSRLWGA | 0.100 |
| 1 | ACCSGDPASS | 0.100 |
| 9 | SSRLWGAPLQ | 0.010 |
| 2 | CCSGDPASSR | 0.010 |
| 10 | SRLWGAPLQP | 0.002 |
| 5 | GDPASSRLWG | 0.002 |
| 7 | PASSRLWGAP | 0.001 |

[1048] TABLE XVII

V21-HLA-A24-10MERS-PSCA
Each peptide is a portion of SEQ ID NO: 8;
each start position is specified, the
length of peptide is 10 amino acids, and
the end position for each peptide is the
start position plus nine.

| | | |
|---|---|---|
| START | SUBSEQUENCE | SCORE |

| | | |
|---|---|---|
| 9 | TDPAQWEPVL | 0.600 |
| 3 | ASVPLLTDPA | 0.216 |
| 5 | VPLLTDPAQW | 0.150 |
| 8 | LTDPAQWEPV | 0.120 |
| 10 | DPAQWEPVLV | 0.100 |
| 4 | SVPLLTDPAQ | 0.015 |
| 7 | LLTDPAQWEP | 0.013 |
| 2 | QASVPLLTDP | 0.012 |
| 6 | PLLTDPAQWE | 0.002 |
| 1 | PQASVPLLTD | 0.001 |

[1049] TABLE XVII

V21 & 22-HLA-A24-10MERS-PSCA
Each peptide is a portion of SEQ ID NO: 8;
each start position is specified, the
length of peptide is 10 amino acids, and
the end position for each peptide is the
start position plus nine.

| | | |
|---|---|---|
| START | SUBSEQUENCE | SCORE |

| | | |
|---|---|---|
| 1 | QASVPLLTDL | 4.800 |
| 8 | TDLAQWEPVL | 0.600 |
| 2 | ASVPLLTDLA | 0.216 |
| 4 | VPLLTDLAQW | 0.150 |
| 7 | LTDLAQWEPV | 0.100 |
| 9 | DLAQWEPVLV | 0.100 |
| 3 | SVPLLTDLAQ | 0.015 |
| 6 | LLTDLAQWEP | 0.013 |
| 5 | PLLTDLAQWE | 0.002 |

[1050] TABLE XVII

V22-HLA-A24-10MERS-PSCA
Each peptide is a portion of SEQ ID NO: 8;
each start position is specified, the
length of peptide is 10 amino acids, and
the end position for each peptide is the
start position plus nine.

| | | |
|---|---|---|
| START | SUBSEQUENCE | SCORE |

| | | |
|---|---|---|
| 1 | QASVPLLTHL | 4.800 |
| 8 | THLAQWEPVL | 0.600 |
| 2 | ASVPLLTHLA | 0.216 |
| 4 | VPLLTHLAQW | 0.150 |
| 7 | LTHLAQWEPV | 0.100 |
| 9 | HLAQWEPVLV | 0.100 |
| 10 | LAQWEPVLVP | 0.015 |
| 3 | SVPLLTHLAQ | 0.015 |
| 6 | LLTHLAQWEP | 0.011 |
| 5 | PLLTHLAQWE | 0.002 |

[1051] TABLE XVII

V24-HLA-A24-10MERS-PSCA
Each peptide is a portion of SEQ ID NO: 8;
each start position is specified, the
length of peptide is 10 amino acids, and
the end position for each peptide is the
start position plus nine.

| | | |
|---|---|---|
| START | SUBSEQUENCE | SCORE |

| | | |
|---|---|---|
| 10 | TPVPHPDPPM | 0.900 |
| 6 | MYVCTPVPHP | 0.750 |
| 3 | SLTMYVCTPV | 0.140 |
| 1 | NASLTMYVCT | 0.100 |
| 9 | CTPVPHPDPP | 0.015 |
| 4 | LTMYVCTPVP | 0.015 |
| 2 | ASLTMYVCTP | 0.015 |
| 7 | YVCTPVPHPD | 0.014 |
| 8 | VCTPVPHPDP | 0.012 |
| 5 | TMYVCTPVPH | 0.010 |

[1052] TABLE XVII

V25-HLA-A24-10MERS-PSCA
Each peptide is a portion of SEQ ID NO: 8;
each start position is specified, the
length of peptide is 10 amino acids, and
the end position for each peptide is the
start position plus nine.

| | | |
|---|---|---|
| START | SUBSEQUENCE | SCORE |

| | | |
|---|---|---|
| 3 | RTPTRQISSI | 3.000 |
| 1 | LSRTPTRQIS | 0.120 |
| 9 | ISSIDTDPPA | 0.100 |
| 7 | RQISSIDTDP | 0.042 |
| 10 | SSIDTDPPAD | 0.018 |
| 4 | TPTRQISSID | 0.014 |
| 2 | SRTPTRQISS | 0.012 |
| 8 | QISSIDTDPP | 0.010 |
| 5 | PTRQISSIDT | 0.010 |
| 6 | TRQISSIDTD | 0.002 |

[1053] TABLE XVII

V26-HLA-A24-10MERS-PSCA
Each peptide is a portion of SEQ ID NO: 8;
each start position is specified, the
length of peptide is 10 amino acids, and
the end position for each peptide is the
start position plus nine.

| | | |
|---|---|---|
| START | SUBSEQUENCE | SCORE |

| | | |
|---|---|---|
| 1 | RTPTRQISSS | 0.300 |
| 7 | ISSSDTDPPA | 0.100 |
| 5 | RQISSSDTDP | 0.030 |
| 2 | TPTRQISSSD | 0.014 |
| 8 | SSSDTDPPAD | 0.012 |
| 6 | QISSSDTDPP | 0.010 |
| 3 | PTRQISSSDT | 0.010 |
| 4 | TRQISSSDTD | 0.002 |

[1054] TABLE XVII

V27-HLA-A24-10MERS-PSCA
Each peptide is a portion of SEQ ID NO: 8;
each start position is specified, the
length of peptide is 10 amino acids, and
the end position for each peptide is the
start position plus nine.

| | | |
|---|---|---|
| START | SUBSEQUENCE | SCORE |

| | | |
|---|---|---|
| 1 | PSRGQALRRA | 0.010 |
| 2 | SRGQALRRAQ | 0.001 |

[1055] TABLE XVIII

V1-HLA-B7-9MERS-PSCA
Each peptide is a portion of SEQ ID NO: 2;
each start position is specified, the
length of peptide is 9 amino acids, and
the end position for each peptide is the
start position plus eight.

| | | |
|---|---|---|
| START | SUBSEQUENCE | SCORE |

| | | |
|---|---|---|
| 50 | TARIRAVGL | 120.000 |
| 101 | QPAAAILAL | 80.000 |
| 60 | TVISKGCSL | 20.000 |
| 13 | LALQPGTAL | 18.000 |
| 107 | LALLPALGL | 18.000 |
| 28 | AQVSNEDCL | 12.000 |
| 105 | AILALLPAL | 12.000 |
| 108 | ALLPALGLL | 12.000 |
| 99 | ALQPAAAIL | 12.000 |
| 7 | ALLMAGLAL | 12.000 |
| 14 | ALQPGTALL | 12.000 |
| 92 | CNASGAHAL | 4.000 |
| 36 | LQVENCTQL | 4.000 |
| 83 | NITCCDTDL | 4.000 |
| 109 | LLPALGLLL | 4.000 |
| 5 | LLALLMAGL | 4.000 |
| 115 | LLLWGPGQL | 4.000 |
| 2 | KAVLLALLM | 3.000 |
| 98 | HALQPAAAI | 1.800 |
| 3 | AVLLALLMA | 1.500 |
| 102 | PAAAILALL | 1.200 |
| 54 | RAVGLLTVI | 1.200 |
| 51 | ARIRAVGLL | 1.200 |
| 52 | RIRAVGLLT | 1.000 |
| 104 | AAILALLPA | 0.900 |
| 78 | YVGKKNITC | 0.500 |
| 16 | QPGTALLCY | 0.400 |
| 110 | LPALGLLLW | 0.400 |
| 1 | MKAVLLALL | 0.400 |
| 55 | AVGLLTVIS | 0.300 |
| 96 | GAHALQPAA | 0.300 |
| 11 | AGLALQPGT | 0.300 |
| 20 | ALLCYSCKA | 0.300 |
| 6 | LALLMAGLA | 0.300 |
| 27 | KAQVSNEDC | 0.300 |
| 22 | LCYSCKAQV | 0.200 |
| 30 | VSNEDCLQV | 0.200 |
| 47 | QCWTARIRA | 0.150 |
| 34 | DCLQVENCT | 0.100 |
| 18 | GTALLCYSC | 0.100 |
| 15 | LQPGTALLC | 0.100 |
| 62 | ISKGCSLNC | 0.100 |
| 95 | SGAHALQPA | 0.100 |
| 79 | VGKKNITCC | 0.100 |
| 40 | NCTQLGEQC | 0.100 |
| 43 | QLGEQCWTA | 0.100 |
| 100 | LQPAAAILA | 0.100 |
| 84 | ITCCDTDLC | 0.100 |
| 91 | LCNASGAHA | 0.100 |
| 42 | TQLGEQCWT | 0.100 |
| 12 | GLALQPGTA | 0.100 |
| 58 | LLTVISKGC | 0.100 |
| 103 | AAAILALLP | 0.090 |
| 29 | QVSNEDCLQ | 0.050 |
| 45 | GEQCWTARI | 0.040 |
| 76 | DYYVGKKNI | 0.040 |
| 94 | ASGAHALQP | 0.030 |
| 112 | ALGLLLWGP | 0.030 |

[1056] TABLE XVIII

V1-HLA-B7-9MERS-PSCA
Each peptide is a portion of SEQ ID NO: 2;
each start position is specified, the
length of peptide is 9 amino acids, and
the end position for each peptide is the
start position plus eight.

| | | |
|---|---|---|
| START | SUBSEQUENCE | SCORE |

| | | |
|---|---|---|
| 104 | AAILALLPA | 0.900 |
| 78 | YVGKKNITC | 0.500 |
| 16 | QPGTALLCY | 0.400 |
| 110 | LPALGLLLW | 0.400 |
| 1 | MKAVLLALL | 0.400 |
| 55 | AVGLLTVIS | 0.300 |
| 96 | GAHALQPAA | 0.300 |
| 11 | AGLALQPGT | 0.300 |
| 20 | ALLCYSCKA | 0.300 |
| 6 | LALLMAGLA | 0.300 |
| 27 | KAQVSNEDC | 0.300 |
| 22 | LCYSCKAQV | 0.200 |
| 30 | VSNEDCLQV | 0.200 |
| 47 | QCWTARIRA | 0.150 |
| 34 | DCLQVENCT | 0.100 |
| 18 | GTALLCYSC | 0.100 |
| 15 | LQPGTALLC | 0.100 |
| 62 | ISKGCSLNC | 0.100 |
| 95 | SGAHALQPA | 0.100 |
| 79 | VGKKNITCC | 0.100 |
| 40 | NCTQLGEQC | 0.100 |
| 43 | QLGEQCWTA | 0.100 |
| 100 | LQPAAAILA | 0.100 |
| 84 | ITCCDTDLC | 0.100 |
| 91 | LCNASGAHA | 0.100 |
| 42 | TQLGEQCWT | 0.100 |
| 12 | GLALQPGTA | 0.100 |
| 58 | LLTVISKGC | 0.100 |
| 103 | AAAILALLP | 0.090 |
| 29 | QVSNEDCLQ | 0.050 |
| 45 | GEQCWTARI | 0.040 |
| 76 | DYYVGKKNI | 0.040 |
| 94 | ASGAHALQP | 0.030 |
| 112 | ALGLLLWGP | 0.030 |
| 97 | AHALQPAAA | 0.030 |
| 70 | CVDDSQDYY | 0.030 |
| 8 | LLMAGLALQ | 0.030 |
| 10 | MAGLALQPG | 0.030 |
| 93 | NASGAHALQ | 0.030 |
| 19 | TALLCYSCK | 0.030 |
| 86 | CCDTDLCNA | 0.030 |
| 69 | NCVDDSQDY | 0.020 |
| 63 | SKGCSLNCV | 0.020 |
| 41 | CTQLGEQCW | 0.020 |
| 59 | LTVISKGCS | 0.020 |
| 85 | TCCDTDLCN | 0.020 |
| 61 | VISKGCSLN | 0.020 |
| 66 | CSLNCVDDS | 0.020 |
| 53 | IRAVGLLTV | 0.020 |
| 48 | CWTARIRAV | 0.020 |
| 24 | YSCKAQVSN | 0.020 |
| 37 | QVENCTQLG | 0.015 |
| 49 | WTARIRAVG | 0.015 |
| 33 | EDCLQVENC | 0.010 |
| 46 | EQCWTARIR | 0.010 |
| 64 | KGCSLNCVD | 0.010 |
| 65 | GCSLNCVDD | 0.010 |
| 113 | LGLLLWGPG | 0.010 |
| 57 | GLLTVISKG | 0.010 |
| 35 | CLQVENCTQ | 0.010 |
| 21 | LLCYSCKAQ | 0.010 |
| 67 | SLNCVDDSQ | 0.010 |
| 90 | DLCNASGAH | 0.010 |
| 81 | KKNITCCDT | 0.010 |
| 39 | ENCTQLGEQ | 0.010 |
| 114 | GLLLWGPGQ | 0.010 |
| 73 | DSQDYYVGK | 0.010 |
| 9 | LMAGLALQP | 0.010 |
| 25 | SCKAQVSNE | 0.010 |
| 68 | LNCVDDSQD | 0.010 |
| 106 | ILALLPALG | 0.010 |
| 89 | TDLCNASGA | 0.010 |
| 77 | YYVGKKNIT | 0.010 |
| 4 | VLLALLMAG | 0.010 |
| 56 | VGLLTVISK | 0.010 |
| 82 | KNITCCDTD | 0.010 |

[1057] TABLE XVIII

V4-HLA-B7-9MERS-
PSCA
Each peptide is a portion of SEQ
ID NO: 8; each start position is
specified, the length of peptide is 9
amino acids, and the end position
for each peptide is the start
position plus eight.

| | | |
|---|---|---|
| START | SUBSEQUENCE | SCORE |

| | | |
|---|---|---|
| 32 | LPPSLRCSL | 120.000 |
| 160 | FPAHPIYDL | 120.000 |
| 66 | VPQASVPLL | 80.000 |
| 76 | HPAQWEPVL | 80.000 |
| 65 | VVPQASVPL | 20.000 |
| 57 | APLQPTLGV | 18.000 |
| 24 | AGPMPCSRL | 18.000 |
| 114 | TPTRQIGSI | 8.000 |
| 111 | LSRTPTRQI | 6.000 |
| 8 | WARRTSRAV | 6.000 |
| 163 | HPIYDLSQV | 4.000 |
| 146 | TLNPVLRHL | 4.000 |
| 51 | SYRLWGAPL | 4.000 |
| 55 | WGAPLQPTL | 4.000 |
| 130 | GPSNPLCCC | 3.000 |
| 176 | SPAPSRGQA | 3.000 |
| 102 | VPHPDPPMA | 2.000 |
| 106 | DPPMALSRT | 2.000 |
| 19 | TCATPAGPM | 1.500 |
| 177 | PAPSRGQAL | 1.200 |
| 46 | SGDPASYRL | 1.200 |
| 143 | AFSTLNPVL | 1.200 |
| 12 | TSRAVTPTC | 1.000 |
| 35 | SLRCSLHSA | 1.000 |
| 101 | PVPHPDPPM | 0.750 |
| 25 | GPMPCSRLP | 0.600 |
| 22 | TPAGPMPCS | 0.600 |
| 94 | LTMYVCAPV | 0.600 |
| 178 | APSRGQALR | 0.600 |
| 100 | APVPHPDPP | 0.600 |
| 127 | PADGPSNPL | 0.540 |
| 84 | LVPEAHPNA | 0.500 |
| 170 | QVWSVVSPA | 0.500 |
| 70 | SVPLLTHPA | 0.500 |
| 9 | ARRTSRAVT | 0.450 |
| 14 | RAVTPTCAT | 0.450 |
| 28 | PCSRLPPSL | 0.400 |
| 89 | HPNASLTMY | 0.400 |
| 125 | DPPADGPSN | 0.400 |
| 27 | MPCSRLPPS | 0.400 |
| 139 | FHGPAFSTL | 0.400 |
| 88 | AHPNASLTM | 0.300 |
| 42 | SACCSGDPA | 0.300 |
| 48 | DPASYRLWG | 0.300 |
| 21 | ATPAGPMPC | 0.300 |
| 63 | LGVVPQASV | 0.300 |
| 92 | ASLTMYVCA | 0.300 |
| 87 | EAHPNASLT | 0.300 |
| 91 | NASLTMYVC | 0.300 |
| 148 | NPVLRHLFP | 0.200 |
| 167 | DLSQVWSVV | 0.200 |
| 81 | EPVLVPEAH | 0.002 |
| 60 | QPTLGVVPQ | 0.200 |
| 133 | NPLCCCFHG | 0.200 |
| 155 | FPQEAFPAH | 0.200 |
| 17 | TPTCATPAG | 0.200 |
| 71 | VPLLTHPAQ | 0.200 |
| 141 | GPAFSTLNP | 0.200 |
| 104 | HPDPPMALS | 0.180 |
| 29 | CSRLPPSLR | 0.150 |
| 15 | AVTPTCATP | 0.150 |
| 85 | VPEAHPNAS | 0.120 |
| 11 | RTSRAVTPT | 0.100 |
| 129 | DGPSNPLCC | 0.100 |
| 16 | VTPTCATPA | 0.100 |
| 120 | GSIDTDPPA | 0.100 |
| 4 | RTTTWARRT | 0.100 |
| 150 | VLRHLFPQE | 0.100 |
| 37 | RCSLHSACC | 0.100 |
| 135 | LCCCFHGPA | 0.100 |
| 1 | MTHR1TVWA | 0.100 |
| 173 | SVVSPAPSR | 0.075 |
| 97 | YVCAPVPHP | 0.075 |
| 43 | ACCSGDPAS | 0.060 |
| 158 | EAFPAHPIY | 0.060 |
| 86 | PEAHPNASL | 0.060 |
| 107 | PPMALSRTP | 0.060 |
| 103 | PHPDPPMAL | 0.060 |
| 77 | PAQWEPVLV | 0.060 |
| 142 | PAFSTLNPV | 0.060 |
| 157 | QEAFPAHPI | 0.060 |
| 174 | VVSPAPSRG | 0.050 |
| 64 | GVVPQASVP | 0.050 |
| 99 | CAPVPHPDP | 0.045 |
| 78 | AQWEPVLVP | 0.045 |
| 68 | QASVPLLTH | 0.045 |
| 50 | ASYRLWGAP | 0.030 |
| 128 | ADGPSNPLC | 0.030 |
| 56 | GAPLQPTLG | 0.030 |
| 109 | MALSRTPTR | 0.030 |
| 49 | PASYRLWGA | 0.030 |
| 69 | ASVPLLTHP | 0.030 |
| 5 | TTTWARRTS | 0.030 |
| 20 | CATPAGPMP | 0.030 |
| 110 | ALSRTPTRQ | 0.030 |
| 147 | LNPVLRHLF | 0.030 |
| 137 | CCFHGPAFS | 0.020 |
| 58 | PLQPTLGVV | 0.020 |
| 126 | PPADGPSNP | 0.020 |
| 31 | RLPPSLRCS | 0.020 |

[1058] TABLE XVIII

V19-HLA-B7-9MERS-PSCA
Each peptide is a portion of SEQ ID NO: 8;
each start position is specified, the
length of peptide is 9 amino acids, and
the end position for each peptide is the
start position plus eight.

| | | |
|---|---|---|
| START | SUBSEQUENCE | SCORE |

| | | |
|---|---|---|
| 1 | GPMPCSRLL | 240.000 |
| 8 | LLPSLRCSL | 6.000 |
| 3 | MPCSRLLPS | 0.400 |
| 4 | PCSRLLPSL | 0.400 |
| 9 | LPSLRCSLH | 0.200 |
| 5 | CSRLLPSLR | 0.100 |
| 7 | RLLPSLRCS | 0.020 |
| 6 | SRLLPSLRC | 0.015 |
| 2 | PMPCSRLLP | 0.002 |

[1059] TABLE XVIII

V20-HLA-B7-9MERS-PSCA
Each peptide is a portion of SEQ ID NO: 8;
each start position is specified, the
length of peptide is 9 amino acids, and
the end position for each peptide is the
start position plus eight.

| | | |
|---|---|---|
| START | SUBSEQUENCE | SCORE |

| | | |
|---|---|---|
| 8 | SSRLWGAPL | 40.000 |
| 3 | SGDPASSRL | 1.200 |
| 5 | DPASSRLWG | 0.300 |
| 6 | PASSRLWGA | 0.030 |
| 7 | ASSRLWGAP | 0.030 |
| 1 | CCSGDPASS | 0.020 |
| 2 | CSGDPASSR | 0.015 |
| 4 | GDPASSRLW | 0.002 |
| 9 | SRLWGAPLQ | 0.001 |

[1060] TABLE XVIII

V21-HLA-B7-9MERS-PSCA
Each peptide is a portion of SEQ ID NO: 8;
each start position is specified, the
length of peptide is 9 amino acids, and
the end position for each peptide is the
start position plus eight.

| | | |
|---|---|---|
| START | SUBSEQUENCE | SCORE |

| | | |
|---|---|---|
| 9 | DPAQWEPVL | 80.000 |
| 3 | SVPLLTDPA | 0.500 |
| 4 | VPLLTDPAQ | 0.200 |
| 1 | QASVPLLTD | 0.045 |
| 2 | ASVPLLTDP | 0.030 |
| 8 | TDPAQWEPV | 0.020 |
| 6 | LLTDPAQWE | 0.015 |
| 7 | LTDPAQWEP | 0.003 |
| 5 | PLLTDPAQW | 0.002 |

[1061] TABLE XVIII

V21 & 22-HLA-B7-9MERS-PSCA
Each peptide is a portion of SEQ ID NO: 8;
each start position is specified, the
length of peptide is 9 amino acids, and
the end position for each peptide is the
start position plus eight.

| | | |
|---|---|---|
| START | SUBSEQUENCE | SCORE |

| | | |
|---|---|---|
| 1 | ASVPLLTDL | 12.000 |
| 8 | DLAQWEPVL | 4.000 |
| 2 | SVPLLTDLA | 0.500 |
| 3 | VPLLTDLAQ | 0.200 |
| 7 | TDLAQWEPV | 0.020 |
| 5 | LLTDLAQWE | 0.010 |
| 6 | LTDLAQWEP | 0.003 |
| 4 | PLLTDLAQW | 0.002 |

[1062] TABLE XVIII

V22-HLA-B7-9MERS-PSCA
Each peptide is a portion of SEQ ID NO: 8;
each start position is specified, the
length of peptide is 9 amino acids, and
the end position for each peptide is the
start position plus eight.

| | | |
|---|---|---|
| START | SUBSEQUENCE | SCORE |

| | | |
|---|---|---|
| 1 | ASVPLLTHL | 12.000 |
| 8 | HLAQWEPVL | 4.000 |
| 9 | LAQWEPVLV | 0.600 |
| 2 | SVPLLTHLA | 0.500 |
| 3 | VPLLTHLAQ | 0.200 |
| 7 | THLAQWEPV | 0.020 |
| 6 | LTHLAQWEP | 0.010 |
| 5 | LLTHLAQWE | 0.010 |
| 4 | PLLTHLAQW | 0.002 |

[1063] TABLE XVIII

V24-HLA-B7-9MERS-
PSCA
Each peptide is a portion of SEQ ID
NO: 8; each start position is
specified, the length of peptide is 9
amino acids, and the end position
for each peptide is the start position
plus eight.

| | | |
|---|---|---|
| START | SUBSEQUENCE | SCORE |

| | | |
|---|---|---|
| 3 | LTMYVCTPV | 0.600 |
| 1 | ASLTMYVCT | 0.300 |
| 6 | YVCTPVPHP | 0.075 |
| 8 | CTPVPHPDP | 0.015 |
| 4 | TMYVCTPVP | 0.010 |
| 7 | VCTPVPHPD | 0.010 |
| 2 | SLTMYVCTP | 0.010 |
| 5 | MYVCTPVPH | 0.001 |

[1064] TABLE XVIII

V25&26-HLA-B7-
9MERS-PSCA
Each peptide is a portion of SEQ ID
NO: 8; each start position is
specified, the length of peptide is 9
amino acids, and the end position
for each peptide is the start position
plus eight.

| | | |
|---|---|---|
| START | SUBSEQUENCE | SCORE |

| | | |
|---|---|---|
| 3 | TPTRQISSI | 8.000 |
| 9 | SSIDTDPPA | 0.100 |
| 2 | RTPTRQISS | 0.020 |
| 8 | ISSIDTDPP | 0.010 |
| 7 | QISSIDTDP | 0.010 |
| 4 | PTRQISSID | 0.010 |
| 6 | RQISSIDTD | 0.010 |
| 5 | TRQISSIDT | 0.010 |
| 1 | SRTPTRQIS | 0.003 |

[1065] TABLE XVIII

V25&26-HLA-B7-
9MERS-PSCA
Each peptide is a portion of SEQ ID
NO: 8; each start position is
specified, the length of peptide is 9
amino acids, and the end position
for each peptide is the start position
plus eight.

| | | |
|---|---|---|
| START | SUBSEQUENCE | SCORE |

| | | |
|---|---|---|
| 1 | TPTRQISSS | 0.400 |
| 7 | SSSDTDPPA | 0.100 |
| 5 | QISSSDTDP | 0.010 |
| 6 | ISSSDTDPP | 0.010 |
| 3 | TRQISSSDT | 0.010 |
| 2 | PTRQISSSD | 0.010 |
| 4 | RQISSSDTD | 0.010 |

[1066] TABLE XVIII

V26-HLA-B7-9MERS-
PSCA
Each peptide is a portion of SEQ ID
NO: 8; each start position is
specified, the length of peptide is 9
amino acids, and the end position
for each peptide is the start position
plus eight.

| | | |
|---|---|---|
| START | SUBSEQUENCE | SCORE |

| | | |
|---|---|---|
| 1 | TPTRQIGSS | 0.400 |
| 7 | GSSDTDPPA | 0.100 |
| 5 | QIGSSDTDP | 0.010 |
| 6 | IGSSDTDPP | 0.010 |
| 4 | RQIGSSDTD | 0.010 |
| 3 | TRQIGSSDT | 0.010 |
| 2 | PTRQIGSSD | 0.010 |
| 8 | SSDTDPPAD | 0.003 |
| 9 | SDTDPPADG | 0.002 |

[1067] TABLE XVIII

V27-HLA-B7-9MERS-PSCA
Each peptide is a portion of SEQ ID
NO: 8; each start position is specified,
the length of peptide is 9 amino acids,
and the end position for each peptide
is the start position plus eight.

| | | |
|---|---|---|
| START | SUBSEQUENCE | SCORE |

| | | |
|---|---|---|
| 2 | RGQALRRAQ | 0.015 |
| 1 | SRGQALRRA | 0.010 |

[1068] TABLE XIX

V1-HLA-B7-10MERS-PSCA
Each peptide is a portion of SEQ ID
NO: 2; each start position is specified,
the length of peptide is 10 amino
acids, and the end position for each
peptide is the start position plus nine.

| | | |
|---|---|---|
| START | SUBSEQUENCE | SCORE |

| | | |
|---|---|---|
| 50 | TARIRAVGLL | 120.000 |
| 101 | QPAAAILALL | 80.000 |
| 104 | AAILALLPAL | 36.000 |
| 108 | ALLPALGLLL | 12.000 |
| 107 | LALLPALGLL | 12.000 |
| 98 | HALQPAAAIL | 12.000 |
| 6 | LALLMAGLAL | 12.000 |
| 27 | KAQVSNEDCL | 12.000 |
| 13 | LALQPGTALL | 12.000 |
| 106 | ILALLPALGL | 6.000 |
| 12 | GLALQPGTAL | 6.000 |
| 35 | CLQVENCTQL | 4.000 |
| 59 | LTVISKGCSL | 4.000 |
| 91 | LCNASGAHAL | 4.000 |
| 114 | GLLLWGPGQL | 4.000 |
| 100 | LQPAAAILAL | 4.000 |
| 49 | WTARIRAVGL | 4.000 |
| 4 | VLLALLMAGL | 4.000 |
| 82 | KNITCCDTDL | 4.000 |
| 52 | RIRAVGLLTV | 2.000 |
| 29 | QVSNEDCLQV | 1.000 |
| 103 | AAAILALLPA | 0.900 |
| 78 | YVGKKNITCC | 0.500 |
| 16 | QPGTALLCYS | 0.400 |
| 70 | CVDDSQDYYV | 0.300 |
| 11 | AGLALQPGTA | 0.300 |
| 99 | ALQPAAAILA | 0.300 |
| 10 | MAGLALQPGT | 0.300 |
| 96 | GAHALQPAAA | 0.300 |
| 94 | ASGAHALQPA | 0.300 |
| 2 | KAVLLALLMA | 0.300 |
| 19 | TALLCYSCKA | 0.300 |
| 14 | ALQPGTALLC | 0.300 |
| 62 | ISKGCSLNCV | 0.200 |
| 110 | LPALGLLLWG | 0.200 |
| 21 | LLCYSCKAQV | 0.200 |
| 47 | QCWTARIRAV | 0.200 |
| 97 | AHALQPAAAI | 0.180 |
| 3 | AVLLALLMAG | 0.150 |
| 46 | EQCWTARIRA | 0.150 |
| 55 | AVGLLTVISK | 0.150 |
| 44 | LGEQCWTARI | 0.120 |
| 41 | CTQLGEQCWT | 0.100 |
| 60 | TVISKGCSLN | 0.100 |
| 57 | GLLTVISKGC | 0.100 |
| 61 | YISKGCSLNC | 0.100 |
| 5 | LLALLMAGLA | 0.100 |
| 90 | DLCNASGAHA | 0.100 |
| 42 | TQLGEQCWTA | 0.100 |
| 39 | ENCTQLGEQC | 0.100 |
| 1 | MKAVLLALLM | 0.100 |
| 95 | SGAHALQPAA | 0.100 |
| 83 | NITCCDTDLC | 0.100 |
| 85 | TCCDTDLCNA | 0.100 |
| 54 | RAVGLLTVIS | 0.060 |
| 75 | QDYYVGKKNI | 0.040 |
| 53 | IRAVGLLTVI | 0.040 |
| 51 | ARIRAVGLLT | 0.030 |
| 105 | AILALLPALG | 0.030 |
| 112 ALGLLLWGPG | 0.030 | |
| 8 | LLMAGLALQP | 0.030 |
| 28 | AQVSNEDCLQ | 0.030 |
| 93 | NASGAHALQP | 0.030 |
| 20 | ALLCYSCKAQ | 0.030 |
| 7 | ALLMAGLALQ | 0.030 |
| 88 | DTDLCNASGA | 0.030 |
| 69 | NCVDDSQDYY | 0.020 |
| 58 | LLTVISKGCS | 0.020 |
| 65 | GCSLNCVDDS | 0.020 |
| 68 | LNCVDDSQDY | 0.020 |
| 40 | NCTQLGEQCW | 0.020 |
| 109 | LLPALGLLLW | 0.020 |
| 84 | ITCCDTDLCN | 0.020 |
| 22 | LCYSCKAQVS | 0.020 |
| 15 | LQPGTALLCY | 0.020 |
| 37 | QVENCTQLGE | 0.015 |
| 34 | DCLQVENCTQ | 0.010 |
| 33 | EDCLQVENCT | 0.010 |
| 25 | SCKAQVSNED | 0.010 |
| 79 | VGKKNITCCD | 0.010 |
| 64 | KGCSLNCVDD | 0.010 |
| 73 | DSQDYYVGKK | 0.010 |
| 26 | CKAQVSNEDC | 0.010 |
| 92 | CNASGAHALQ | 0.010 |
| 67 | SLNCVDDSQD | 0.010 |
| 80 | GKKNITCCDT | 0.010 |
| 66 | CSLNCVDDSQ | 0.010 |
| 76 | DYYVGKKNIL | 0.010 |
| 77 | YYVGKKNITC | 0.010 |
| 30 | VSNEDCLQVE | 0.010 |
| 24 | YSCKAQVSNE | 0.010 |
| 17 | PGTALLCYSC | 0.010 |
| 9 | LMAGLALQPG | 0.010 |
| 56 | VGLLTVISKG | 0.010 |
| 36 | LQVENCTQLG | 0.010 |
| 43 | QLGEQCWTAR | 0.010 |
| 113 | LGLLLWGPGQ | 0.010 |
| 18 | GTALLOYSCK | 0.010 |
| 86 | CCDTDLCNAS | 0.006 |
| 74 | SQDYYVGKKN | 0.006 |

[1069] TABLE XIX

V4-HLA-B7-10MERS-PSCA
Each peptide is a portion of SEQ ID NO: 8;
each start position is specified, the
length of peptide is 10 amino acids, and
the end position for each peptide is the
start position plus nine.

| | | |
|---|---|---|
| START | SUBSEQUENCE | SCORE |

| | | |
|---|---|---|
| 102 | VPHPDPPMAL | 120.000 |
| 100 | APVPHPDPPM | 90.000 |
| 27 | MPCSRLPPSL | 80.000 |
| 176 | SPAPSRGQAL | 80.000 |
| 85 | VPEAHPNASL | 36.000 |
| 64 | GVVPQASVPL | 20.000 |
| 65 | VVPQASVPLL | 20.000 |
| 126 | PPADGPSNPL | 12.000 |
| 50 | ASYRLWGAPL | 12.000 |
| 57 | APLQPTLGVV | 12.000 |
| 31 | RLPPSLRCSL | 6.000 |
| 8 | WARRTSRAVT | 4.500 |
| 141 | GPAFSTLNPV | 4.000 |
| 89 | HPNASLTMYV | 4.000 |
| 45 | CSGDPASYRL | 4.000 |
| 76 | HPAQWEPVLV | 4.000 |
| 145 | STLNPVLRHL | 4.000 |
| 87 | EAHPNASLTM | 3.000 |
| 60 | QPTLGVVPQA | 2.000 |
| 66 | VPQASVPLLT | 2.000 |
| 48 | DPASYRLWGA | 2.000 |
| 159 | AFPAHPIYDL | 1.800 |
| 23 | PAGPMPCSRL | 1.800 |
| 110 | ALSRTPTRQI | 1.800 |
| 15 | AVTPTCATPA | 1.500 |
| 29 | CSRLPPSLRC | 1.500 |
| 142 | PAFSTLNPVL | 1.200 |
| 35 | SLRCSLHSAC | 1.000 |
| 12 | TSRAVTPTCA | 1.000 |
| 150 | VLRHLFPQEA | 1.000 |
| 107 | PPMALSRTPT | 0.900 |
| 25 | GPMPCSRLPP | 0.900 |
| 56 | GAPLQPTLGV | 0.900 |
| 178 | APSRGQALRR | 0.600 |
| 163 | HPIYDLSQVW | 0.400 |
| 113 | RTPTRQIGSI | 0.400 |
| 75 | THPAQWEPVL | 0.400 |
| 54 | LWGAPLQPTL | 0.400 |
| 130 | GPSNPLCCCF | 0.400 |
| 160 | FPAHPIYDLS | 0.400 |
| 138 | CFHGPAFSTL | 0.400 |
| 71 | VPLLTHPAQW | 0.400 |
| 81 | EPVLVPEAHP | 0.300 |
| 62 | TLGVVPQASV | 0.300 |
| 20 | CATPAGPMPC | 0.300 |
| 91 | NASLTMYVCA | 0.300 |
| 69 | ASVPLLTHPA | 0.300 |
| 125 | DPPADGPSNP | 0.200 |
| 32 | LPPSLRCSLH | 0.200 |
| 22 | TPAGPMPCSR | 0.200 |
| 148 | NPVLRHLFPQ | 0.200 |
| 106 | DPPMALSRTP | 0.200 |
| 155 | FPQEAFPAHP | 0.200 |
| 17 | TPTCATPAGP | 0.200 |
| 133 | NPLCCCFHGP | 0.200 |
| 93 | SLTMYVCAPV | 0.200 |
| 114 | TPTRQIGSID | 0.200 |
| 74 | LTHPAQWEPV | 0.200 |
| 53 | RLWGAPLQPT | 0.150 |
| 111 | LSRTPTRQIG | 0.150 |
| 137 | CGFHGPAFST | 0.150 |
| 129 | DGPSNPLCCC | 0.150 |
| 175 | VSPAPSRGQA | 0.150 |
| 18 | PTCATPAGPM | 0.150 |
| 179 | PSRGQALRRA | 0.100 |
| 153 | HLFPQEAFPA | 0.100 |
| 11 | RTSRAVTPTC | 0.100 |
| 6 | TTWARRTSRA | 0.100 |
| 83 | VLVPEAHPNA | 0.100 |
| 119 | IGSIDTDPPA | 0.100 |
| 84 | LVPEAHPNAS | 0.100 |
| 169 | SQVWSVVSPA | 0.100 |
| 115 | PTRQIGSIDT | 0.100 |
| 41 | HSACCSGDPA | 0.100 |
| 21 | ATPAGPMPCS | 0.090 |
| 174 | VVSPAPSRGQ | 0.075 |
| 104 | HPDPPMALSR | 0.060 |
| 162 | AHPIYDLSQV | 0.060 |
| 42 | SACCSGDPAS | 0.060 |
| 43 | ACCSGDPASY | 0.060 |
| 101 | PVPHPDPPMA | 0.050 |
| 70 | SVPLLTHPAQ | 0.050 |
| 173 | SVVSPAPSRG | 0.050 |
| 97 | YVCAPVPHPD | 0.050 |
| 170 | QVWSVVSPAP | 0.050 |
| 33 | PPSLRCSLHS | 0.040 |
| 24 | AGPMPCSRLP | 0.030 |
| 146 | TLNPVLRHLF | 0.030 |
| 94 | LTMYVCAPVP | 0.030 |
| 92 | ASLTMYVCAP | 0.030 |
| 128 | ADGPSNPLCC | 0.030 |
| 68 | QASVPLLTHP | 0.030 |
| 9 | ARRTSRAVTP | 0.030 |
| 78 | AQWEPVLVPE | 0.030 |
| 14 | RAVTPTCATP | 0.030 |
| 99 | CAPVPHPDPP | 0.030 |
| 109 | MALSRTPTRQ | 0.030 |
| 4 | RTTTWARRTS | 0.030 |
| 158 | EAFPAHPIYD | 0.030 |
| 166 | YDLSQVWSVV | 0.020 |

[1070] TABLE XIX

V19-HLA-B7-10MERS-PSCA
Each peptide is a portion of SEQ ID NO: 8;
each start position is specified, the
length of peptide is 10 amino acids, and
the end position for each peptide is the
start position plus nine.

| | | |
|---|---|---|
| START | SUBSEQUENCE | SCORE |

| | | |
|---|---|---|
| 4 | MPCSRLLPSL | 80.000 |
| 1 | AGPMPCSRLL | 12.000 |
| 8 | RLLPSLRCSL | 6.000 |
| 6 | CSRLLPSLRC | 1.500 |
| 2 | GPMPCSRLLP | 0.900 |
| 10 | LPSLRCSLHS | 0.400 |
| 9 | LLPSLRCSLH | 0.010 |
| 3 | PMPCSRLLPS | 0.002 |
| 7 | SRLLPSLRCS | 0.002 |
| 5 | PCSRLLPSLR | 0.001 |

[1071] TABLE XIX

V20-HLA-B7-10MERS-PSCA
Each peptide is a portion of SEQ ID NO: 8;
each start position is specified, the
length of peptide is 10 amino acids, and
the end position for each peptide is the
start position plus nine.

| | | |
|---|---|---|
| START | SUBSEQUENCE | SCORE |

| | | |
|---|---|---|
| 8 | ASSRLWGAPL | 12.000 |
| 3 | CSGDPASSRL | 4.000 |
| 6 | DPASSRLWGA | 2.000 |
| 9 | SSRLWGAPLQ | 0.100 |
| 1 | ACCSGDPASS | 0.060 |
| 2 | CCSGDPASSR | 0.015 |
| 4 | SGDPASSRLW | 0.006 |
| 7 | PASSRLWGAP | 0.003 |
| 5 | GDPASSRLWG | 0.002 |
| 10 | SRLWGAPLQP | 0.001 |

[1072] TABLE XIX

V21-HLA-B7-10MERS-PSCA
Each peptide is a portion of SEQ ID NO: 8;
each start position is specified, the
length of peptide is 10 amino acids, and
the end position for each peptide is the
start position plus nine.

| | | |
|---|---|---|
| START | SUBSEQUENCE | SCORE |

| | | |
|---|---|---|
| 10 | DPAQWEPVLV | 4.000 |
| 9 | TDPAQWEPVL | 0.400 |
| 5 | VPLLTDPAQW | 0.400 |
| 3 | ASVPLLTDPA | 0.300 |
| 8 | LTDPAQWEPV | 0.060 |
| 4 | SVPLLTDPAQ | 0.050 |
| 2 | QASVPLLTDP | 0.030 |
| 7 | LLTDPAQWEP | 0.010 |
| 6 | PLLTDPAQWE | 0.002 |
| 1 | PQASVPLLTD | 0.002 |

[1073] TABLE XIX

V21 & 22-HLA-B7-10MERS-PSCA
Each peptide is a portion of SEQ ID NO: 8;
each start position is specified, the
length of peptide is 10 amino acids, and
the end position for each peptide is the
start position plus nine.

| | | |
|---|---|---|
| START | SUBSEQUENCE | SCORE |

| | | |
|---|---|---|
| 1 | QASVPLLTDL | 12.000 |
| 8 | TDLAQWEPVL | 0.400 |
| 4 | VPLLTDLAQW | 0.400 |
| 2 | ASVPLLTDLA | 0.300 |
| 9 | DLAQWEPVLV | 0.200 |
| 7 | LTDLAQWEPV | 0.060 |
| 3 | SVPLLTDLAQ | 0.050 |
| 6 | LLTDLAQWEP | 0.010 |
| 5 | PLLTDLAQWE | 0.001 |

[1074] TABLE XIX

V22-HLA-B7-10MERS-PSCA
Each peptide is a portion of SEQ ID NO: 8;
each start position is specified, the
length of peptide is 10 amino acids, and
the end position for each peptide is the
start position plus nine.

| | | |
|---|---|---|
| START | SUBSEQUENCE | SCORE |

| | | |
|---|---|---|
| 1 | QASVPLLTHL | 12.000 |
| 8 | THLAQWEPVL | 0.400 |
| 4 | VPLLTHLAQW | 0.400 |
| 2 | ASVPLLTHLA | 0.300 |
| 7 | LTHLAQWEPV | 0.200 |
| 9 | HLAQWEPVLV | 0.200 |
| 3 | SVPLLTHLAQ | 0.050 |
| 10 | LAQWEPVLVP | 0.045 |
| 6 | LLTHLAQWEP | 0.010 |
| 5 | PLLTHLAQWE | 0.001 |

[1075] TABLE XIX

V24-HLA-B7-10MERS-PSCA
Each peptide is a portion of SEQ ID NO: 8;
each start position is specified, the
length of peptide is 10 amino acids, and
the end position for each peptide is the
start position plus nine.

| | | |
|---|---|---|
| START | SUBSEQUENCE | SCORE |

| | | |
|---|---|---|
| 10 | TPVPHPDPPM | 30.000 |
| 1 | NASLTMYVCT | 0.300 |
| 3 | SLTMYVCTPV | 0.200 |
| 7 | YVCTPVPHPD | 0.050 |
| 2 | ASLTMYVCTP | 0.030 |
| 4 | LTMYVCTPVP | 0.030 |
| 8 | VCTPYPHPDP | 0.015 |
| 9 | CTPVPHPDPP | 0.010 |
| 5 | TMYVCTPVPH | 0.010 |
| 6 | MYVCTPVPHP | 0.002 |

[1076] TABLE XIX

V25-HLA-B7-10MERS-PSCA
Each peptide is a portion of SEQ ID NO: 8;
each start position is specified, the
length of peptide is 10 amino acids, and
the end position for each peptide is the
start position plus nine.

| | | |
|---|---|---|
| START | SUBSEQUENCE | SCORE |

| | | |
|---|---|---|
| 3 | RTPTRQISSI | 0.400 |
| 1 | LSRTPTRQIS | 0.300 |
| 4 | TPTRQISSID | 0.200 |
| 9 | ISSIDTDPPA | 0.100 |
| 5 | PTRQISSIDT | 0.100 |
| 10 | SSIDTDPPAD | 0.010 |
| 7 | RQISSIDTDP | 0.010 |
| 8 | QISSIDTDPP | 0.010 |
| 2 | SRTPTRQISS | 0.002 |
| 6 | TRQISSIDTD | 0.001 |

[1077] TABLE XIX

V25 & 26-HLA-B7-10MERS-PSCA
Each peptide is a portion of SEQ ID NO: 8;
each start position is specified, the
length of peptide is 10 amino acids, and
the end position for each peptide is the
start position plus nine.

| | | |
|---|---|---|
| START | SUBSEQUENCE | SCORE |

| | | |
|---|---|---|
| 2 | TPTRQISSSD | 0.200 |
| 7 | ISSSDTDPPA | 0.100 |
| 3 | PTRQISSSDT | 0.100 |
| 1 | RTPTRQISSS | 0.020 |
| 8 | SSSDTDPPAD | 0.010 |
| 6 | QISSSDTDPP | 0.010 |
| 5 | RQISSSDTDP | 0.010 |
| 4 | TRQISSSDTD | 0.001 |

[1078] TABLE XIX

V26-HLA-B7-10MERS-PSCA
Each peptide is a portion of SEQ ID NO: 8;
each start position is specified, the
length of peptide is 10 amino acids, and
the end position for each peptide is the
start position plus nine.

| | | |
|---|---|---|
| START | SUBSEQUENCE | SCORE |

| | | |
|---|---|---|
| 2 | TPTRQIGSSD | 0.200 |
| 3 | PTRQIGSSDT | 0.100 |
| 7 | IGSSDTDPPA | 0.100 |
| 1 | RTPTRQIGSS | 0.020 |
| 8 | GSSDTDPPAD | 0.010 |
| 6 | QIGSSDTDPP | 0.010 |
| 5 | RQIGSSDTDP | 0.010 |
| 9 | SSDTDPPADG | 0.004 |
| 10 | SDTDPPADGP | 0.002 |
| 4 | TRQIGSSDTD | 0.001 |

[1079] TABLE XIX

V27-HLA-B7-10MERS-PSCA
Each peptide is a portion of SEQ ID NO: 8;
each start position is specified, the
length of peptide is 10 amino acids, and
the end position for each peptide is the
start position plus nine.

| | | |
|---|---|---|
| START | SUBSEQUENCE | SCORE |

| | | |
|---|---|---|
| 1 | PSRGQALRRA | 0.100 |
| 2 | SRGQALRRAQ | 0.002 |

[1080] TABLE XX

V1-HLA-B3501-9MERS-PSCA
Each peptide is a portion of SEQ ID NO: 2;
each start position is specified, the
length of peptide is 9 amino acids, and
the end position for each peptide is the
start position plus eight.

| | | |
|---|---|---|
| START | SUBSEQUENCE | SCORE |

| | | |
|---|---|---|
| 16 | QPGTALLCY | 40.000 |
| 101 | QPAAAILAL | 20.000 |
| 2 | KAVLLALLM | 12.000 |
| 110 | LPALGLLLW | 10.000 |
| 50 | TARIRAVGL | 9.000 |
| 69 | NCVDDSQDY | 6.000 |
| 107 | LALLPALGL | 3.000 |
| 30 | VSNEDCLQV | 3.000 |
| 13 | LALQPGTAL | 3.000 |
| 54 | RAVGLLTVI | 2.400 |
| 36 | LQVENCTQL | 2.000 |
| 62 | ISKGCSLNC | 1.500 |
| 70 | CVDDSQDYY | 1.200 |
| 98 | HALQRAAAI | 1.200 |
| 60 | TVISKGCSL | 1.000 |
| 99 | ALQPAAAIL | 1.000 |
| 108 | ALLPALGLL | 1.000 |
| 105 | AILALLPAL | 1.000 |
| 115 | LLLWGPGQL | 1.000 |
| 83 | NITCCDTDL | 1.000 |
| 14 | ALQPGTALL | 1.000 |
| 28 | AQVSNEDCL | 1.000 |
| 92 | CNASGAHAL | 1.000 |
| 5 | LLALLMAGL | 1.000 |
| 109 | LLPALGLLL | 1.000 |
| 7 | ALLMAGLAL | 1.000 |
| 52 | RIRAVGLLT | 0.600 |
| 27 | KAQVSNEDC | 0.600 |
| 24 | YSCKAQVSN | 0.500 |
| 41 | CTQLGEQCW | 0.500 |
| 66 | CSLNCVDDS | 0.500 |
| 79 | VGKKNITCC | 0.300 |
| 104 | AAILALLPA | 0.300 |
| 102 | PAAAILALL | 0.300 |
| 96 | GAHALQPAA | 0.300 |
| 6 | LALLMAGLA | 0.300 |
| 85 | TCCDTDLCN | 0.200 |
| 43 | QLGEQCWTA | 0.200 |
| 22 | LCYSCKAQV | 0.200 |
| 42 | TQLGEQCWT | 0.150 |
| 84 | ITCCDTDLC | 0.150 |
| 100 | LQPAAAILA | 0.100 |
| 59 | LTVISKGCS | 0.100 |
| 78 | YVGKKNITC | 0.100 |
| 12 | GLALQPGTA | 0.100 |
| 73 | DSQDYYVGK | 0.100 |
| 47 | QCWTARIRA | 0.100 |
| 18 | GTALLCYSC | 0.100 |
| 61 | VISKGCSLN | 0.100 |
| 15 | LQPGTALLC | 0.100 |
| 55 | AVGLLTVIS | 0.100 |
| 3 | AVLLALLMA | 0.100 |
| 1 | MKAVLLALL | 0.100 |
| 51 | ARIRAVGLL | 0.100 |
| 95 | SGAHALQPA | 0.100 |
| 91 | LCNASGAHA | 0.100 |
| 20 | ALLCYSCKA | 0.100 |
| 58 | LLTVISKGC | 0.100 |
| 34 | DCLQVENCT | 0.100 |
| 40 | NCTQLGEQC | 0.100 |
| 11 | AGLALQPGT | 0.100 |
| 94 | ASGAHALQP | 0.050 |
| 86 | CCDTDLCNA | 0.045 |
| 45 | GEQCWTARI | 0.040 |
| 76 | DYYVGKKNI | 0.040 |
| 25 | SCKAQVSNE | 0.030 |
| 19 | TALLCYSCK | 0.030 |
| 93 | NASGAHALQ | 0.030 |
| 103 | AAAILALLP | 0.030 |
| 10 | MAGLALQPG | 0.030 |
| 64 | KGCSLNCVD | 0.020 |
| 63 | SKGCSLNCV | 0.020 |
| 82 | KNITCCDTD | 0.020 |
| 87 | CDTDLCNAS | 0.020 |
| 53 | IRAVGLLTV | 0.020 |
| 81 | KKNITCCDT | 0.020 |
| 48 | CWTARIRAV | 0.020 |
| 29 | QVSNEDCLQ | 0.015 |
| 68 | LNCVDDSQD | 0.015 |
| 35 | CLQVENCTQ | 0.015 |
| 113 | LGLLLWGPG | 0.010 |
| 90 | DLCNASGAH | 0.010 |
| 114 | GLLLWGPGQ | 0.010 |
| 33 | EDCLQVENC | 0.010 |
| 21 | LLCYSCKAQ | 0.010 |
| 67 | SLNCVDDSQ | 0.010 |
| 57 | GLLTVISKG | 0.010 |
| 23 | CYSCKAQVS | 0.010 |
| 112 | ALGLLLWGP | 0.010 |
| 17 | PGTALLCYS | 0.010 |
| 56 | VGLLTVISK | 0.010 |
| 49 | WTARIRAVG | 0.010 |
| 9 | LMAGLALQP | 0.010 |
| 39 | ENCTQLGEQ | 0.010 |
| 65 | GCSLNCVDD | 0.010 |
| 97 | AHALQPAAA | 0.010 |
| 106 | ILALLPALG | 0.010 |
| 8 | LLMAGLALQ | 0.010 |
| 46 | EQCWTARIR | 0.010 |
| 89 | TDLCNASGA | 0.010 |

[1081] TABLE XX

V4-HLA-B3501-9MERS-PSCA
Each peptide is a portion of SEQ ID NO: 8;
each start position is specified, the
length of peptide is 9 amino acids, and
the end position for each peptide is the
start position plus eight.

| | | |
|---|---|---|
| START | SUBSEQUENCE | SCORE |

| | | |
|---|---|---|
| 89 | HPNASLTMY | 40.000 |
| 76 | HPAQWEPVL | 20.000 |
| 32 | LPPSLRCSL | 20.000 |
| 160 | FPAHPIYDL | 20.000 |
| 66 | VPQASVPLL | 20.000 |
| 114 | TPTRQIGSI | 8.000 |
| 163 | HPIYDLSQV | 6.000 |
| 158 | EAFPAHPIY | 6.000 |
| 111 | LSRTPTRQI | 6.000 |
| 57 | APLQPTLGV | 4.000 |
| 125 | DPPADGPSN | 3.000 |
| 102 | VPHPDPPMA | 3.000 |
| 44 | CCSGDPASY | 3.000 |
| 130 | GPSNPLCCC | 2.000 |
| 27 | MPCSRLPPS | 2.000 |
| 176 | SPAPSRGQA | 2.000 |
| 22 | TPAGPMPCS | 2.000 |
| 19 | TCATPAGPM | 2.000 |
| 106 | DPPMALSRT | 2.000 |
| 8 | WARRTSRAV | 1.800 |
| 12 | TSRAVTPTC | 1.500 |
| 147 | LNPVLRHLF | 1.000 |
| 146 | TLNPVLRHL | 1.000 |
| 65 | VVPQASVPL | 1.000 |
| 120 | GSIDTDPPA | 1.000 |
| 55 | WGAPLQPTL | 1.000 |
| 24 | AGPMPCSRL | 1.000 |
| 136 | CCCFHGPAF | 1.000 |
| 104 | HPDPPMALS | 0.609 |
| 85 | VPEAHPNAS | 0.600 |
| 14 | RAVTPTCAT | 0.600 |
| 131 | PSNPLCCCF | 0.500 |
| 92 | ASLTMYVCA | 0.500 |
| 38 | CSLHSACCS | 0.500 |
| 172 | WSVVSPAPS | 0.500 |
| 168 | LSQVWSVVS | 0.500 |
| 155 | FPQEAFPAH | 0.400 |
| 35 | SLRCSLHSA | 0.300 |
| 91 | NASLTMYVC | 0.300 |
| 87 | EAHPNASLT | 0.300 |
| 177 | PAPSRGQAL | 0.300 |
| 46 | SGDPASYRL | 0.300 |
| 42 | SACCSGDPA | 0.300 |
| 51 | SYRLWGAPL | 0.300 |
| 152 | RHLFPQEAF | 0.200 |
| 71 | VPLLTHPAQ | 0.200 |
| 113 | RTPTRQIGS | 0.200 |
| 63 | LGVVPQASV | 0.200 |
| 11 | RTSRAVTPT | 0.200 |
| 133 | NPLCCCFHG | 0.200 |
| 167 | DLSQVWSVV | 0.200 |
| 81 | EPVLVPEAH | 0.200 |
| 148 | NPVLRHLFP | 0.200 |
| 25 | GPMPCSRLP | 0.200 |
| 178 | APSRGQALR | 0.200 |
| 60 | QPTLGWPQ | 0.200 |
| 88 | AHPNASLTM | 0.200 |
| 94 | LTMYVCAPV | 0.200 |
| 100 | APVPHPDPP | 0.200 |
| 17 | TPTCATPAG | 0.200 |
| 48 | DPASYRLWG | 0.200 |
| 31 | RLPPSLRCS | 0.200 |
| 101 | PVPHPDPPM | 0.200 |
| 37 | RCSLHSACC | 0.200 |
| 4 | RTTTWARRT | 0.200 |
| 84 | LVPEAHPNA | 0.200 |
| 141 | GPAFSTLNP | 0.200 |
| 29 | CSRLPPSLR | 0.150 |
| 83 | VLVPEAHPN | 0.150 |
| 21 | ATPAGPMPC | 0.100 |
| 16 | VTPTCATPA | 0.100 |
| 143 | AFSTLNPVL | 0.100 |
| 135 | LCCCFHGPA | 0.100 |
| 1 | MTHRTTTWA | 0.100 |
| 139 | FHGPAFSTL | 0.100 |
| 45 | CSGDPASYR | 0.100 |
| 28 | PCSRLPPSL | 0.100 |
| 5 | TTTWARRTS | 0.100 |
| 164 | PIYDLSQVW | 0.100 |
| 70 | SVPLLTHPA | 0.100 |
| 43 | ACCSGDPAS | 0.100 |
| 62 | TLGVVPQAS | 0.100 |
| 170 | QVWSVVSPA | 0.100 |
| 129 | DGPSNPLCC | 0.100 |
| 137 | CCFHGPAFS | 0.100 |
| 140 | HGPAFSTLN | 0.100 |
| 127 | PADGPSNPL | 0.090 |
| 77 | PAQWEPVLV | 0.090 |
| 142 | PAFSTLNPV | 0.060 |
| 69 | ASVPLLTHP | 0.050 |
| 144 | FSTLNPVLR | 0.050 |
| 72 | PLLTHPAQW | 0.050 |
| 175 | VSPAPSRGQ | 0.050 |
| 47 | GDPASYRLW | 0.050 |
| 34 | PSLRCSLHS | 0.050 |
| 50 | ASYRLWGAP | 0.050 |
| 41 | HSACCSGDP | 0.050 |
| 157 | QEAFPAHPI | 0.040 |
| 126 | PPADGPSNP | 0.040 |
| 150 | VLRHLFPQE | 0.030 |

[1082] TABLE XX

V19-HLA-B3501-9MERS-PSCA
Each peptide is a portion of SEQ ID NO: 8;
each start position is specified, the
length of peptide is 9 amino acids, and
the end position for each peptide is the
start position plus eight.

| | | |
|---|---|---|
| START | SUBSEQUENCE | SCORE |

| | | |
|---|---|---|
| 1 | GPMPCSRLL | 20.000 |
| 3 | MPCSRLLPS | 2.000 |
| 8 | LLPSLRCSL | 1.000 |
| 7 | RLLPSLRCS | 0.200 |
| 9 | LPSLRCSLH | 0.200 |
| 5 | CSRLLPSLR | 0.150 |
| 4 | PCSRLLPSL | 0.100 |
| 6 | SRLLPSLRC | 0.010 |
| 2 | PMPCSRLLP | 0.001 |

[1083] TABLE XX

V20-HLA-B3501-9MERS-PSCA
Each peptide is a portion of SEQ ID NO: 8;
each start position is specified, the
length of peptide is 9 amino acids, and
the end position for each peptide is the
start position plus eight.

| | | |
|---|---|---|
| START | SUBSEQUENCE | SCORE |

| | | |
|---|---|---|
| 8 | SSRLWGAPL | 15.000 |
| 3 | SGDPASSRL | 0.300 |
| 5 | DPASSRLWG | 0.200 |
| 1 | CCSGDPASS | 0.150 |
| 2 | CSGDPASSR | 0.100 |
| 4 | GDPASSRLW | 0.050 |
| 7 | ASSRLWGAP | 0.050 |
| 6 | PASSRLWGA | 0.030 |
| 9 | SRLWGAPLQ | 0.001 |

[1084] TABLE XX

V21-HLA-B3501-9MERS-PSCA
Each peptide is a portion of SEQ ID NO: 8;
each start position is specified, the
length of peptide is 9 amino acids, and
the end position for each peptide is the
start position plus eight.

| | | |
|---|---|---|
| START | SUBSEQUENCE | SCORE |

| | | |
|---|---|---|
| 9 | DPAQWEPVL | 20.000 |
| 4 | VPLLTDPAQ | 0.200 |
| 3 | SVPLLTDPA | 0.100 |
| 5 | PLLTDPAQW | 0.075 |
| 2 | ASVPLLTDP | 0.050 |
| 1 | QASVPLLTD | 0.030 |
| 6 | LLTDPAQWE | 0.020 |
| 8 | TDPAQWEPV | 0.020 |
| 7 | LTDPAQWEP | 0.003 |

[1085] TABLE XX

V21 & 22-HLA-B3501-9MERS-PSCA
Each peptide is a portion of SEQ ID NO: 8;
each start position is specified, the
length of peptide is 9 amino acids, and
the end position for each peptide is the
start position plus eight.

| | | |
|---|---|---|
| START | SUBSEQUENCE | SCORE |

| | | |
|---|---|---|
| 1 | ASVPLLTDL | 5.000 |
| 8 | DLAQWEPVL | 1.000 |
| 3 | VPLLTDLAQ | 0.200 |
| 2 | SVPLLTDLA | 0.100 |
| 4 | PLLTDLAQW | 0.075 |
| 7 | TDLAQWEPV | 0.020 |
| 5 | LLTDLAQWE | 0.020 |
| 6 | LTDLAQWEP | 0.003 |

[1086] TABLE XX

V22-HLA-B3501-9MERS-
PSCA
Each peptide is a portion of SEQ ID
NO: 8; each start position is specified,
the length of peptide is 9 amino acids,
and the end position for each peptide
is the start position plus eight.

| | | |
|---|---|---|
| START | SUBSEQUENCE | SCORE |

| | | |
|---|---|---|
| 1 | ASVPLLTHL | 5.000 |
| 8 | HLAQWEPVL | 1.000 |
| 9 | LAQWEPVLV | 0.900 |
| 3 | VPLLTHLAQ | 0.200 |
| 2 | SVPLLTHLA | 0.100 |
| 4 | PLLTHLAQW | 0.059 |
| 7 | THLAQWEPV | 0.020 |
| 6 | LTHLAQWEP | 0.010 |
| 5 | LLTHLAQWE | 0.010 |

[1087] TABLE XX

V24-HLA-B3501-9MERS-
PSCA
Each peptide is a portion of SEQ ID
NO: 8; each start position is specified,
the length of peptide is 9 amino acids,
and the end position for each peptide
is the start position plus eight.

| | | |
|---|---|---|
| START | SUBSEQUENCE | SCORE |

| | | |
|---|---|---|
| 1 | ASLTMYVCT | 5.000 |
| 3 | LTMYVCTPV | 0.200 |
| 7 | VCTPVPHPD | 0.010 |
| 6 | YVCTPVPHP | 0.010 |
| 4 | TMYVCTPVP | 0.010 |
| 8 | CTPVPHPDP | 0.010 |
| 2 | SLTMYVCTP | 0.010 |
| 5 | MYVCTPVPH | 0.001 |

[1088] TABLE XX

V25-HLA-B3501-9MERS-
PSCA
Each peptide is a portion of SEQ ID
NO: 8; each start position is specified,
the length of peptide is 9 amino acids,
and the end position for each peptide
is the start position plus eight.

| | | |
|---|---|---|
| START | SUBSEQUENCE | SCORE |

| | | |
|---|---|---|
| 3 | TPTRQISSI | 8.000 |
| 9 | SSIDTDPPA | 1.000 |
| 2 | RTPTRQISS | 0.200 |
| 8 | ISSIDTDPP | 0.075 |
| 6 | RQISSIDTD | 0.020 |
| 7 | QISSIDTDP | 0.010 |
| 5 | TRQISSIDT | 0.010 |
| 1 | SRTPTRQIS | 0.010 |
| 4 | PTRQISSID | 0.003 |

[1089] TABLE XX

V25&26-HLA-B3501-
9MERS-PSCA
Each peptide is a portion of SEQ
ID NO: 8; each start position is
specified, the length of peptide is 9
amino acids, and the end position
for each peptide is the start
position plus eight.

| | | |
|---|---|---|
| START | SUBSEQUENCE | SCORE |

| | | |
|---|---|---|
| 1 | TPTRQISSS | 2.000 |
| 7 | SSSDTDPPA | 1.000 |
| 6 | ISSSDTDPP | 0.075 |
| 4 | RQISSSDTD | 0.020 |
| 5 | QISSSDTDP | 0.010 |
| 3 | TRQISSSDT | 0.010 |
| 2 | PTRQISSSD | 0.003 |

[1090] TABLE XX

V26-HLA-B3501-9MERS-
PSCA
Each peptide is a portion of SEQ ID
NO: 8; each start position is specified,
the length of peptide is 9 amino acids,
and the end position for each peptide
is the start position plus eight.

| | | |
|---|---|---|
| START | SUBSEQUENCE | SCORE |

| | | |
|---|---|---|
| 1 | TPTRQIGSS | 2.000 |
| 7 | GSSDTDPPA | 1.000 |
| 8 | SSDTDPPAD | 0.023 |
| 4 | RQIGSSDTD | 0.020 |
| 6 | IGSSDTDPP | 0.015 |
| 5 | QIGSSDTDP | 0.010 |
| 3 | TRQIGSSDT | 0.010 |
| 2 | PTRQIGSSD | 0.003 |
| 9 | SDTDPPADG | 0.002 |

[1091] TABLE XX

V27-HLA-B3501-9MERS-
PSCA
Each peptide is a portion of SEQ ID
NO: 8; each start position is specified,
the length of pep~de is 9 amino acids,
and the end position for each peptide
is the start position plus eight.

| | | |
|---|---|---|
| START | SUBSEQUENCE | SCORE |

| | | |
|---|---|---|
| 2 | RGQALRRAQ | 0.020 |
| 1 | SRGQALRRA | 0.010 |

[1092] TABLE XXI

V1-HLA-B3501-10MERS-
PSCA
Each peptide is a portion of SEQ ID
NO: 2; each start position is specified,
the length of peptide is 10 amino
acids, and the end position for each
peptide is the start position plus nine.

| | | |
|---|---|---|
| START | SUBSEQUENCE | SCORE |

| | | |
|---|---|---|
| 101 | QPAAAILALL | 20.000 |
| 50 | TARIRAVGLL | 9.000 |
| 27 | KAQVSNEDCL | 6.000 |
| 69 | NCVDDSQDYY | 4.000 |
| 98 | HALQPAAAJL | 3.000 |
| 6 | LALLMAGLAL | 3.000 |
| 62 | ISKGCSLNCV | 3.000 |
| 104 | AAILALLPAL | 3.000 |
| 107 | LALLPALGLL | 3.000 |
| 13 | LALQPGTALL | 3.000 |
| 68 | LNCVDDSQDY | 3.000 |
| 82 | KNITCCDTDL | 2.000 |
| 16 | QPGTALLCYS | 2.000 |
| 15 | LQPGTALLCY | 2.000 |
| 52 | RIRAVGLLTV | 1.200 |
| 100 | LQPAAAILAL | 1.000 |
| 108 | ALLPALGLLL | 1.000 |
| 114 | GLLLWGPGQL | 1.000 |
| 59 | LTVISKGCSL | 1.000 |
| 106 | ILALLPALGL | 1.000 |
| 4 | VLLALLMAGL | 1.000 |
| 49 | WTARIRAVGL | 1.000 |
| 91 | LCNASGAHAL | 1.000 |
| 12 | GLALQPGTAL | 1.000 |
| 35 | CLQVENCTQL | 1.000 |
| 54 | RAVGLLTVIS | 0.600 |
| 2 | KAVLLALLMA | 0.600 |
| 109 | LLPALGLLLW | 0.500 |
| 94 | ASGAHALQPA | 0.500 |
| 40 | NCTQLGEQCW | 0.500 |
| 10 | MAGLALQPGT | 0.300 |
| 19 | TALLCYSCKA | 0.300 |
| 96 | GAHALQPAAA | 0.300 |
| 103 | AAAILALLPA | 0.300 |
| 85 | TCCDTDLCNA | 0.300 |
| 29 | QVSNEDCLQV | 0.300 |
| 21 | LLCYSCKAQV | 0.200 |
| 1 | MKAVLLALLM | 0.200 |
| 47 | QCWTARIRAV | 0.200 |
| 110 | LPALGLLLWG | 0.200 |
| 41 | CTQLGEQCWT | 0.150 |
| 83 | NITCCDTDLC | 0.150 |
| 44 | LGEQCWTARI | 0.120 |
| 70 | CVDDSQDYYV | 0.120 |
| 14 | ALQPGTALLC | 0.100 |
| 58 | LLTVISKGCS | 0.100 |
| 73 | DSQDYYVGKK | 0.100 |
| 5 | LLALLMAGLA | 0.100 |
| 42 | TQLGEQCWTA | 0.100 |
| 84 | ITCCDTDLCN | 0.100 |
| 61 | VISKGCSLNC | 0.100 |
| 65 | GCSLNCVDDS | 0.100 |
| 22 | LCYSCKAQVS | 0.100 |
| 95 | SGAHALQPAA | 0.100 |
| 78 | YVGKKNITCC | 0.100 |
| 90 | DLCNASGAHA | 0.100 |
| 46 | EQCWTARIRA | 0.100 |
| 30 | VSNEDCLQVE | 0.100 |
| 99 | ALQPAAAILA | 0.100 |
| 57 | GLLTVISKGC | 0.100 |
| 60 | TVISKGCSLN | 0.100 |
| 39 | ENCTQLGEQC | 0.100 |
| 11 | AGLALQPGTA | 0.100 |
| 31 | SNEDCLQVEN | 0.060 |
| 24 | YSCKAQVSNE | 0.050 |
| 66 | CSLNCVDDSQ | 0.050 |
| 97 | AHALQPAAAI | 0.040 |
| 75 | QDYYVGKKNI | 0.040 |
| 53 | IRAVGLLTVI | 0.040 |
| 25 | SCKAQVSNED | 0.030 |
| 79 | VGKKNITCCD | 0.030 |
| 93 | NASGAHALQP | 0.030 |
| 80 | GKKNITCCDT | 0.030 |
| 74 | SQDYYVGKKN | 0.030 |
| 86 | CCDTDLCNAS | 0.030 |
| 88 | DTDLCNASGA | 0.030 |
| 36 | LQVENCTQLG | 0.020 |
| 64 | DGCSLNCVDD | 0.020 |
| 43 | QLGEQCWTAR | 0.020 |
| 28 | AQVSNEDCLQ | 0.015 |
| 34 | CDLQVENCTQ | 0.015 |
| 67 | SLNCVDDSQD | 0.015 |
| 105 | AILALLPALG | 0.010 |
| 76 | DYYVGKKNIT | 0.010 |
| 33 | EDCLQVENCT | 0.010 |
| 26 | CKAQVSNEDC | 0.010 |
| 56 | VGLLTVISKG | 0.010 |
| 112 | ALGLLLWGPG | 0.010 |
| 3 | AVLLALLMAG | 0.010 |
| 55 | AVGLLTVISK | 0.010 |
| 9 | LMAGLALQPG | 0.010 |
| 51 | ARIRAVGLLT | 0.010 |
| 20 | ALLCYSCKAQ | 0.010 |
| 92 | CNASGAHALQ | 0.010 |
| 8 | LLMAGLALQP | 0.010 |
| 113 | LGLLLWGPGQ | 0.010 |
| 18 | GTALLCYSCK | 0.010 |
| 7 | ALLMAGLALQ | 0.010 |
| 77 | YYVGKKNITC | 0.010 |
| 23 | CYSCKAQVSN | 0.010 |

[1093] TABLE XXI

V4-HLA-B3501-10MERS-PSCA
Each peptide is a portion of SEQ ID NO: 8;
each start position is specified, the
length of peptide is 10 amino acids, and
the end position for each peptide is the
start position plus nine.

| | | |
|---|---|---|
| START | SUBSEQUENCE | SCORE |

| | | |
|---|---|---|
| 100 | APVPHPDPPM | 40.000 |
| 130 | GPSNPLCCCF | 20.000 |
| 176 | SPAPSRGQAL | 20.000 |
| 27 | MPCSRLPPSL | 20.000 |
| 102 | VPHPDPPMAL | 20.000 |
| 45 | CSGDPASYRL | 10.000 |
| 163 | HPIYDLSQVW | 10.000 |
| 71 | VPLLTHPAQW | 10.000 |
| 85 | VPEAHPNASL | 6.000 |
| 87 | EAHPNASLTM | 6.000 |
| 76 | HPAQWEPVLV | 6.000 |
| 50 | ASYRLWGAPL | 5.000 |
| 141 | GPAFSTLNPV | 4.000 |
| 57 | APLQPTLGVV | 4.000 |
| 89 | HPNASLTMYV | 4.000 |
| 126 | PPADGPSNPL | 4.000 |
| 43 | ACCSGDPASY | 3.000 |
| 60 | QPTLGVVPQA | 2.000 |
| 66 | VPQASVPLLT | 2.000 |
| 31 | RLPPSLRCSL | 2.000 |
| 160 | FPAHPIYDLS | 2.000 |
| 48 | DPASYRLWGA | 2.000 |
| 12 | TSRAVTPTCA | 1.500 |
| 29 | CSRLPPSLRC | 1.500 |
| 135 | LCCCFHGPAF | 1.000 |
| 65 | VVPQASVPLL | 1.000 |
| 146 | TLNPVLRHLF | 1.000 |
| 64 | GVVPQASVPL | 1.000 |
| 145 | STLNPVLRHL | 1.000 |
| 8 | WARRTSRAVT | 0.900 |
| 113 | RTPTRQIGSI | 0.800 |
| 56 | GAPLQPTLGV | 0.600 |
| 69 | ASVPLLTHPA | 0.500 |
| 175 | VSPAPSRGQA | 0.500 |
| 41 | HSACCSGDPA | 0.500 |
| 155 | FPQEAFPAHP | 0.409 |
| 110 | ALSRTPTRQI | 0.400 |
| 35 | SLRCSLHSAC | 0.300 |
| 20 | CAPPAGPMPC | 0.300 |
| 91 | NASLTMYVCA | 0.300 |
| 142 | PAFSTLNPVL | 0.300 |
| 150 | VLRHLFPQEA | 0.300 |
| 42 | SACCSGDPAS | 0.300 |
| 23 | PAGPMPCSRL | 0.300 |
| 53 | RLWGAPLQPT | 0.200 |
| 32 | LPPSLRCSLH | 0.200 |
| 125 | DPPADGPSNP | 0.200 |
| 74 | LTHPAQWEPV | 0.200 |
| 11 | RTSRAVTPTC | 0.200 |
| 148 | NPVLRHLFPQ | 0.200 |
| 18 | PTCATPAGPM | 0.200 |
| 81 | EPVLVPEAHP | 0.200 |
| 84 | LVPEAHPNAS | 0.200 |
| 106 | DPPMALSRTP | 0.200 |
| 25 | GPMPGSRLPP | 0.200 |
| 33 | PPSLRCSLHS | 0.200 |
| 178 | APSRGQALRR | 0.200 |
| 22 | TPAGPMPGSR | 0.200 |
| 4 | RTTTWARRTS | 0.200 |
| 17 | TPTCATPAGP | 0.200 |
| 93 | SLTMYVCAPV | 0.200 |
| 37 | RCSLHSACCS | 0.200 |
| 133 | NPLCCCFHGP | 0.200 |
| 62 | TLGVVPQASV | 0.200 |
| 157 | QEAFPAHPIY | 0.200 |
| 88 | AHPNASLTMY | 0.200 |
| 107 | PPMALSRTPT | 0.200 |
| 114 | TPTRQIGSID | 0.200 |
| 120 | GSIDTDPPAD | 0.150 |
| 46 | SGDPASYRLW | 0.150 |
| 111 | LSRTPTRQIG | 0.150 |
| 153 | HLFPQEAFPA | 0.150 |
| 179 | PSRGQALRRA | 0.150 |
| 15 | AVTPTCATPA | 0.100 |
| 119 | IGSIDTDPPA | 0.100 |
| 83 | VLVPEAHPNA | 0.100 |
| 6 | TTWARRTSRA | 0.100 |
| 151 | LRHLFPQEAF | 0.100 |
| 54 | LWGAPLQPTL | 0.100 |
| 129 | DGPSNPLCCC | 0.100 |
| 21 | ATPAGPMPCS | 0.100 |
| 167 | DLSQVWSVVS | 0.100 |
| 138 | CFHGPAFSTL | 0.100 |
| 159 | AFPAHPIYDL | 0.100 |
| 169 | SQVWSVVSPA | 0.100 |
| 75 | THPAQWEPVL | 0.100 |
| 136 | CCCFHGPAFS | 0.100 |
| 137 | CCFHGPAFST | 0.100 |
| 104 | HPDPPMALSR | 0.060 |
| 14 | RAVTPTCATP | 0.060 |
| 38 | CSLHSACCSG | 0.050 |
| 172 | WSVVSPAPSR | 0.050 |
| 92 | ASLTMYVCAP | 0.050 |
| 144 | FSTLNPVLRH | 0.050 |
| 168 | LSQVWSVVSP | 0.050 |
| 34 | PSLRCSLHSA | 0.050 |
| 158 | EAFPAHPIYD | 0.030 |
| 162 | AHPIYDLSQV | 0.030 |
| 99 | CAPVPHPDPP | 0.030 |
| 68 | QASVPLLTHP | 0.030 |

[1094] TABLE XXI

V19-HLA-B3501-10MERS-PSCA
Each peptide is a portion of SEQ ID NO: 8;
each start position is specified, the
length of peptide is 10 amino acids, and
the end position for each peptide is the
start position plus nine.

| | | |
|---|---|---|
| START | SUBSEQUENCE | SCORE |

| | | |
|---|---|---|
| 4 | MPCSRLLPSL | 20.000 |
| 8 | RLLPSLRCSL | 2.000 |
| 10 | LPSLRCSLHS | 2.000 |
| 6 | CSRLLPSLRC | 1.500 |
| 1 | AGPMPCSRLL | 1.000 |
| 2 | GPMPCSRLLP | 0.200 |
| 7 | SRLLPSLRCS | 0.010 |
| 3 | PMPCSRLLPS | 0.010 |
| 9 | LLPSLRCSLH | 0.010 |
| 5 | PCSRLLPSLR | 0.001 |

[1095] TABLE XXI

V20-HLA-B3501-10MERS-PSCA
Each peptide is a portion of SEQ ID NO: 8;
each start position is specified, the
length of peptide is 10 amino acids, and
the end position for each peptide is the
start position plus nine.

| | | |
|---|---|---|
| START | SUBSEQUENCE | SCORE |

| | | |
|---|---|---|
| 3 | CSGDPASSRL | 10.000 |
| 8 | ASSRLWGAPL | 5.000 |
| 6 | DPASSRLWGA | 2.000 |
| 9 | SSRLWGAPLQ | 0.150 |
| 1 | ACCSGDPASS | 0.150 |
| 4 | SGDPASSRLW | 0.150 |
| 2 | CCSGDPASSR | 0.010 |
| 7 | PASSRLWGAP | 0.003 |
| 10 | SRLWGAPLQP | 0.001 |
| 5 | GDPASSRLWG | 0.001 |

[1096] TABLE XXI

V21-HLA-B3501-10MERS-PSCA
Each peptide is a portion of SEQ ID NO: 8;
each start position is specified, the
length of peptide is 10 amino acids, and
the end position for each peptide is the
start position plus nine.

| | | |
|---|---|---|
| START | SUBSEQUENCE | SCORE |

| | | |
|---|---|---|
| 5 | VPLLTDPAQW | 15.000 |
| 10 | DPAQWEPVLV | 6.000 |
| 3 | ASVPLLTDPA | 0.500 |
| 9 | TDPAQWEPVL | 0.100 |
| 8 | LTDPAQWEPV | 0.060 |
| 2 | QASVPLLTDP | 0.030 |
| 7 | LLTDPAQWEP | 0.020 |
| 4 | SVPLLTDPAQ | 0.010 |
| 6 | PLLTDPAQWE | 0.001 |
| 1 | PQASVPLLTD | 0.001 |

[1097] TABLE XXI

V21 & 22-HLA-B3501-10MERS-PSCA
Each peptide is a portion of SEQ ID NO: 8;
each start position is specified, the
length of peptide is 10 amino acids, and
the end position for each peptide is the
start position plus nine.

| | | |
|---|---|---|
| START | SUBSEQUENCE | SCORE |

| | | |
|---|---|---|
| 4 | VPLLTDLAQW | 15.000 |
| 1 | QASVPLLTDL | 3.000 |
| 2 | ASVPLLTDLA | 0.500 |
| 9 | DLAQWEPVLV | 0.300 |
| 8 | TDLAQWEPVL | 0.100 |
| 7 | LTDLAQWEPV | 0.060 |
| 6 | LLTDLAQWEP | 0.020 |
| 3 | SVPLLTDLAQ | 0.010 |
| 5 | PLLTDLAQWE | 0.001 |

[1098] TABLE XXI

V22-HLA-B3501-10MERS-PSCA
Each peptide is a portion of SEQ ID NO: 8;
each start position is specified, the
length of peptide is 10 amino acids, and
the end position for each peptide is the
start position plus nine.

| | | |
|---|---|---|
| START | SUBSEQUENCE | SCORE |

| | | |
|---|---|---|
| 4 | VPLLTHLAQW | 10.000 |
| 1 | QASVPLLTHL | 3.000 |
| 2 | ASVPLLTHLA | 0.500 |
| 9 | HLAQWEPVLV | 0.300 |
| 7 | LTHLAQWEPV | 0.200 |
| 8 | THLAQWEPVL | 0.100 |
| 10 | LAQWEPVLVP | 0.030 |
| 3 | SVPLLTHLAQ | 0.010 |
| 6 | LLTHLAQWEP | 0.010 |
| 5 | PLLTHLAQWE | 0.001 |

[1099] TABLE XXI

V24-HLA-B3501-10MERS-PSCA
Each peptide is a portion of SEQ ID NO: 8;
each start position is specified, the
length of peptide is 10 amino acids, and
the end position for each peptide is the
start position plus nine.

| | | |
|---|---|---|
| START | SUBSEQUENCE | SCORE |

| | | |
|---|---|---|
| 10 | TPVPHPDPPM | 40.000 |
| 1 | NASLTMYVCT | 0.300 |
| 3 | SLTMYVCTPV | 0.200 |
| 2 | ASLTMYVCTP | 0.050 |
| 7 | YVCTPVPHPD | 0.010 |
| 8 | VCTPVPHPDP | 0.010 |
| 4 | LTMYVCTPVP | 0.010 |
| 9 | CTPVPHPDPP | 0.010 |
| 5 | TMYVCTPVPH | 0.010 |
| 6 | MYVCTPVPHP | 0.001 |

[1100] TABLE XXI

V25-HLA-B3501-10MERS-PSCA
Each peptide is a portion of SEQ ID NO: 8;
each start position is specified, the
length of peptide is 10 amino acids, and
the end position for each peptide is the
start position plus nine.

| | | |
|---|---|---|
| START | SUBSEQUENCE | SCORE |

| | | |
|---|---|---|
| 1 | LSRTPTRQIS | 1.500 |
| 3 | RTPTRQISSI | 0.800 |
| 9 | ISSIDTDPPA | 0.500 |
| 4 | TPTRQISSID | 0.200 |
| 10 | SSIDTDPPAD | 0.150 |
| 5 | PTRQISSIDT | 0.030 |
| 7 | RQISSIDTDP | 0.020 |
| 8 | QISSIDTDPP | 0.015 |
| 2 | SRTPTRQISS | 0.010 |
| 6 | TRQISSIDTD | 0.001 |

[1101] TABLE XXI

V25 & 26-HLA-B3501-10MERS-PSCA
Each peptide is a portion of SEQ ID NO: 8;
each start position is specified, the
length of peptide is 10 amino acids, and
the end position for each peptide is the
start position plus nine.

| | | |
|---|---|---|
| START | SUBSEQUENCE | SCORE |

| | | |
|---|---|---|
| 7 | ISSSDTDPPA | 0.500 |
| 1 | RTPTRQISSS | 0.200 |
| 2 | TPTRQISSSD | 0.200 |
| 8 | SSSDTDPPAD | 0.150 |
| 3 | PTRQISSSDT | 0.030 |
| 5 | RQISSSDTDP | 0.020 |
| 6 | QISSSDTDPP | 0.015 |
| 4 | TRQISSSDTD | 0.001 |

[1102] TABLE XXI

V26-HLA-B3501-10MERS-PSCA
Each peptide is a portion of SEQ ID NO: 8;
each start position is specified, the
length of peptide is 10 amino acids, and
the end position for each peptide is the
start position plus nine.

| | | |
|---|---|---|
| START | SUBSEQUENCE | SCORE |

| | | |
|---|---|---|
| 1 | RTPTRQIGSS | 0.200 |
| 2 | TPTRQISSSD | 0.200 |
| 8 | GSSDTDPPAD | 0.150 |
| 7 | IGSSDTDPPA | 0.100 |
| 3 | PTRQIGSSDT | 0.030 |
| 5 | RQIGSSDTDP | 0.020 |
| 9 | SSDTDPPADG | 0.015 |
| 6 | QIGSSDTDPP | 0.015 |
| 10 | SDTDPPADGP | 0.002 |
| 4 | TRQIGSSDTD | 0.001 |

[1103] TABLE XXI

V27-HLA-B3501-10MERS-PSCA
Each peptide is a portion of SEQ ID NO: 8;
each start position is specified, the
length of peptide is 10 amino acids, and
the end position for each peptide is the
start position plus nine.

| | | |
|---|---|---|
| START | SUBSEQUENCE | SCORE |

| | | |
|---|---|---|
| 1 | PSRGQALRRA | 0.150 |
| 2 | SRGQALRRAQ | 0.001 |

[1104] TABLE XXII

V1-HLA-A1-9mers-PSCA
Each peptide is a portion of SEQ ID NO: 2;
each start position is specified, the
length of peptide is 9 amino acids, and
the end position for each peptide is the
start position plus eight.

| | | |
|---|---|---|
| Pos | 123456789 | score |

| | | |
|---|---|---|
| 70 | CVDDSQDYY | 25 |
| 16 | QPGTALLCY | 21 |
| 88 | DTDLCNASG | 17 |
| 74 | SQDYYVGKK | 16 |
| 69 | NCVDDSQDY | 15 |
| 31 | SNEDCLQVE | 13 |
| 71 | VDDSQDYYV | 13 |
| 37 | QVENCTQLG | 12 |

[1105] TABLE XXII

V4-HLA-A1-9mers-PSCA
Each peptide is a portion of SEQ ID NO: 8;
each start position is specified, the
length of peptide is 9 amino acids, and
the end position for each peptide is the
start position plus eight.

| | | |
|---|---|---|
| Pos | 123456789 | score |

| | | |
|---|---|---|
| 123 | DTDPPADGP | 21 |
| 158 | EAFPAHPIY | 19 |
| 104 | HPDPPMALS | 17 |
| 44 | CCSGDPASY | 16 |
| 46 | SGDPASYRL | 16 |
| 79 | QWEPVLVPE | 16 |
| 89 | HPNASLTMY | 16 |
| 145 | STLNPVLRH | 16 |
| 30 | SRLPPSLRC | 13 |
| 179 | PSRGQALRR | 13 |
| 121 | SIDTDPPAD | 12 |
| 127 | PADGPSNPL | 12 |
| 85 | VPEAHPNAS | 11 |
| 34 | PSLRCSLHS | 10 |
| 61 | PTLGVVPQA | 10 |
| 67 | PQASVPLLT | 10 |
| 74 | LTHPAQWEP | 10 |
| 78 | AQWEPVLVP | 10 |
| 105 | PDPPMALSR | 10 |
| 113 | RTPTRQIGS | 10 |
| 156 | PQEAFPAHP | 10 |
| 165 | IYDLSQVWS | 10 |

[1106] TABLE XXII

V19-HLA-A1-9mers-PSCA
Each peptide is a portion of SEQ ID NO: 8;
each start position is specified, the
length of peptide is 9 amino acids, and
the end position for each peptide is the
start position plus eight.

| | | |
|---|---|---|
| Pos | 123456789 | score |

| | | |
|---|---|---|
| 2 | PMPCSRLLP | 9 |
| 6 | SRLLPSLRC | 9 |
| 1 | GPMPCSRLL | 6 |
| 3 | MPCSRLLPS | 6 |
| 5 | CSRLLPSLR | 6 |
| 7 | RLLPSLRCS | 5 |

[1107] TABLE XXII

V20-HLA-A1-9mers-PSCA
Each peptide is a portion of SEQ ID NO: 8;
each start position is specified, the
length of peptide is 9 amino acids, and
the end position for each peptide is the
start position plus eight.

| | | |
|---|---|---|
| Pos | 123456789 | score |

| | | |
|---|---|---|
| 3 | SGDPASSRL | 16 |
| 5 | DPASSRLWG | 7 |
| 8 | SSRLWGAPL | 7 |

[1108] TABLE XXII

V21-HLA-A1-9mers-PSCA
Each peptide is a portion of SEQ ID NO: 8;
each start position is specified, the
length of peptide is 9 amino acids, and
the end position for each peptide is the
start position plus eight.

| | | |
|---|---|---|
| Pos | 123456789 | score |

| | | |
|---|---|---|
| 7 | LTDPAQWEP | 20 |
| 2 | ASVPLLTDP | 9 |

[1109] TABLE XXII

V21 & 22-HLA-A1-9mers-PSCA
Each peptide is a portion of SEQ ID NO: 8;
each start position is specified, the
length of peptide is 9 amino acids, and
the end position for each peptide is the
start position plus eight.

| | | |
|---|---|---|
| Pos | 123456789 | score |

| | | |
|---|---|---|
| 6 | LTDLAQWEP | 16 |
| 1 | ASVPLLTDL | 9 |
| 3 | VPLLTDLAQ | 7 |

[1110] TABLE XXII

V22-HLA-A1-9mers-PSCA
Each peptide is a portion of SEQ ID NO: 8;
each start position is specified, the
length of peptide is 9 amino acids, and
the end position for each peptide is the
start position plus eight.

| | | |
|---|---|---|
| Pos | 123456789 | score |

| | | |
|---|---|---|
| 1 | AVPLLTHL | 9 |
| 3 | VPLLTHLAQ | 7 |
| 6 | LTHLAQWEP | 6 |
| 2 | SVPLLTHLA | 4 |

[1111] TABLE XXII

V24-HLA-A1-9mers-PSCA
Each peptide is a portion of SEQ ID NO: 8;
each start position is specified, the
length of peptide is 9 amino acids, and
the end position for each peptide is the
start position plus eight.

| | | |
|---|---|---|
| Pos | 123456789 | score |

| | | |
|---|---|---|
| 3 | LTMYVCTPV | 8 |
| 7 | VCTPVPHPD | 7 |
| 8 | CTPVPHPDP | 7 |
| 1 | ASLTMYVCT | 5 |
| 2 | SLTMYVCTP | 5 |
| 6 | YVCTPVPHP | 4 |

[1112] TABLE XXII

V25-HLA-A1-9mers-PSCA
Each peptide is a portion of SEQ ID NO: 8;
each start position is specified, the
length of peptide is 9 amino acids, and
the end position for each peptide is the
start position plus eight.

| | | |
|---|---|---|
| Pos | 123456789 | score |

| | | |
|---|---|---|
| 2 | RTPTRQISS | 10 |
| 1 | SRTPTRQIS | 7 |
| 4 | PTRQISSID | 6 |
| 9 | SSIDTDPPA | 6 |
| 5 | TRQISSIDT | 4 |
| 8 | ISSIDTDPP | 4 |

[1113] TABLE XXII

V25 & 26-HLA-A1-9mers-PSCA
Each peptide is a portion of SEQ ID NO: 8;
each start position is specified, the
length of peptide is 9 amino acids, and
the end position for each peptide is the
start position plus eight.

| | | |
|---|---|---|
| Pos | 123456789 | score |

| | | |
|---|---|---|
| 2 | PTRQISSSD | 6 |
| 7 | SSSDTDPPA | 6 |
| 6 | ISSSDTDPP | 4 |
| 1 | TPTRQISSS | 2 |

[1114] TABLE XXII

V26-HLA-A1-9mers-PSCA
Each peptide is a portion of SEQ ID NO: 8;
each start position is specified, the
length of peptide is 9 amino acids, and
the end position for each peptide is the
start position plus eight.

| | | |
|---|---|---|
| Pos | 123456789 | score |

| | | |
|---|---|---|
| 8 | SSDTDPPAD | 16 |
| 2 | PTRQIGSSD | 7 |

[1115] TABLE XXII

V27-HLA-A1-9mers-PSCA
Each peptide is a portion of SEQ ID NO: 8;
each start position is specified, the
length of peptide is 9 amino acids, and
the end position for each peptide is the
start position plus eight.

| | | |
|---|---|---|
| Pos | 123456789 | score |

| | | |
|---|---|---|
| 1 | SRGQALRRA | 2 |
| 2 | RGQALRRAQ | 1 |

[1116] TABLE XXIII

V1-HLA-A0201-9mers-PSCA
Each peptide is a portion of SEQ ID NO: 2;
each start position is specified, the
length of peptide is 9 amino acids, and
the end position for each peptide is the
start position plus eight.

| | | |
|---|---|---|
| Pos | 123456789 | score |

| | | |
|---|---|---|
| 14 | ALQPGTALL | 30 |
| 108 | ALLPALGLL | 30 |
| 105 | AILALLPAL | 29 |
| 5 | LLALLMAGL | 28 |
| 7 | ALLMAGLAL | 26 |
| 99 | ALQPAAAIL | 26 |
| 115 | LLLWGPGQL | 26 |
| 109 | LLPALGLLL | 24 |
| 53 | IRAVGLLTV | 23 |
| 8 | LLMAGLALQ | 21 |
| 20 | ALLCYSCKA | 21 |
| 107 | LALLPALGL | 21 |
| 13 | LALQPGTAL | 20 |
| 1 | MKAVLLALL | 19 |
| 4 | VLLALLMAG | 19 |
| 12 | GLALQPGTA | 19 |
| 54 | RAVGLLTVI | 19 |
| 57 | GLLTVISKG | 19 |
| 60 | TVISKGCSL | 19 |
| 102 | PAAAILALL | 19 |
| 43 | QLGEQCWTA | 18 |
| 51 | ARIRAVGLL | 18 |
| 98 | HALQPAAAI | 18 |
| 101 | QPAAAILAL | 18 |
| 112 | ALGLLLWGP | 18 |
| 3 | AVLLALLMA | 17 |
| 50 | TARIRAVGL | 17 |
| 63 | SKGCSLNCV | 17 |
| 83 | NITCCDTDL | 17 |
| 104 | AAILALLPA | 17 |
| 106 | ILALLPALG | 17 |
| 9 | LMAGLALQP | 16 |
| 92 | CNASGAHAL | 16 |
| 22 | LCYSCKAQV | 15 |
| 30 | VSNEDCLQV | 15 |
| 67 | SLNCVDDSQ | 15 |
| 114 | GLLLWGPGQ | 15 |
| 36 | LQVENCTQL | 14 |
| 48 | CWTARIRAV | 14 |
| 46 | SGDPASYRL | 15 |
| 127 | PADGPSNPL | 15 |
| 139 | FHGPAFSTL | 15 |
| 153 | HLFPQEAFP | 15 |
| 163 | HPIYDLSQV | 15 |
| 39 | SLHSACCSG | 14 |
| 51 | SYRLWGAPL | 14 |
| 53 | RLWGAPLQP | 14 |
| 61 | PTLGVVPQA | 14 |
| 70 | SVPLLTHPA | 14 |
| 83 | VLVPEAHPN | 14 |
| 86 | PEAHPNASL | 14 |
| 143 | AFSTLNPVL | 14 |
| 145 | STLNPVLRH | 14 |
| 24 | AGPMPCSRL | 13 |
| 76 | HPAQWEPVL | 13 |
| 77 | PAQWEPVLV | 13 |
| 84 | LVPEAHPNA | 13 |
| 111 | LSRTPTRQI | 13 |
| 114 | TPTRQIGSI | 13 |
| 150 | VLRHLFPQE | 13 |
| 170 | QVWSWSPA | 13 |

[1117] TABLE XXIII

V4-HLA-A0201-9mers-PSCA
Each peptide is a portion of SEQ ID NO: 8;
each start position is specified, the
length of peptide is 9 amino acids, and
the end position for each peptide is the
start position plus eight.

| | | |
|---|---|---|
| Pos | 123456789 | score |

| | | |
|---|---|---|
| 146 | TLNPVLRHL | 27 |
| 35 | SLRCSLHSA | 23 |
| 58 | PLQPTLGVV | 23 |
| 166 | YDLSQVWSV | 20 |
| 57 | APLQPTLGV | 19 |
| 160 | FPAHPIYDL | 19 |
| 167 | DLSQVWSVV | 19 |
| 55 | WGAPLQPTL | 18 |
| 94 | LTMYVCAPV | 18 |
| 63 | LGVVPQASV | 17 |
| 65 | VVPQASVPL | 17 |
| 93 | SLTMYVCAP | 17 |
| 142 | PAFSTLNPV | 17 |
| 31 | RLPPSLRCS | 16 |
| 66 | VPQASVPLL | 16 |
| 8 | WARRTSRAV | 15 |
| 32 | LPPSLRCSL | 15 |
| 46 | SGDPASYRL | 15 |
| 127 | PADGPSNPL | 15 |
| 139 | FHGPAFSTL | 15 |
| 153 | HLFPQEAFP | 15 |
| 163 | HPIYDLSQV | 15 |
| 39 | SLHSACCSG | 14 |
| 51 | SYRLWGAPL | 14 |
| 53 | RLWGAPLQP | 14 |
| 61 | PTLGVVPQA | 14 |
| 70 | SVPLLTHPA | 14 |
| 83 | VLVPEAHPN | 14 |
| 86 | PEAHPNASL | 14 |
| 143 | AFSTLNPVL | 14 |
| 145 | STLNPVLRH | 14 |
| 24 | AGPMPCSRL | 13 |
| 76 | HPAQWEPVL | 13 |
| 77 | PAQWEPVLV | 13 |
| 84 | LVPEAHPNA | 13 |
| 111 | LSRTPTRQI | 13 |
| 114 | TPTRQIGSI | 13 |
| 150 | VLRHLFPQE | 13 |
| 170 | QVWSVVSPA | 13 |

[1118] TABLE XXIII

V19-HLA-A0201-9mers-PSCA
Each peptide is a portion of SEQ ID NO: 8;
each start position is specified, the
length of peptide is 9 amino acids, and
the end position for each peptide is the
start position plus eight.

| | | |
|---|---|---|
| Pos | 123456789 | score |

| | | |
|---|---|---|
| 8 | LLPSLRCSL | 25 |
| 7 | RLLPSLRCS | 18 |
| 4 | PCSRLLPSL | 15 |
| 1 | GPMPCSRLL | 14 |

[1119] TABLE XXIII

V20-HLA-A0201-9mers-PSCA
Each peptide is a portion of SEQ ID NO: 8;
each start position is specified, the
length of peptide is 9 amino acids, and
the end position for each peptide is the
start position plus eight.

| | | |
|---|---|---|
| Pos | 123456789 | score |

| | | |
|---|---|---|
| 3 | SGDPASSRL | 14 |
| 8 | SSRLWGAPL | 14 |
| 6 | PASSRLWGA | 10 |
| 9 | SRLWGAPLQ | 7 |
| 1 | CCSGDPASS | 6 |

[1120] TABLE XXIII

V21-HLA-
A0201-9mers-PSCA
Each peptide is a portion
of SEQ ID NO: 8; each
start position is specified,
the length of peptide is 9
amino acids, and the end
position for each peptide
is the start position plus
eight.

| | | |
|---|---|---|
| Pos | 123456789 | score |

| | | |
|---|---|---|
| 3 | SVPLLTDPA | 13 |
| 6 | LLTDPAQWE | 13 |
| 1 | QASVPLLTD | 12 |
| 9 | DPAQWEPVL | 12 |
| 5 | PLLTDEAQW | 11 |
| 7 | LTDPAQWEP | 10 |
| 8 | TDPAQWEPV | 10 |
| 2 | ASVPLLTDP | 9 |

[1121] TABLE XXIII

V21&22-HLA-
A0201-9mers-PSCA
Each peptide is a portion
of SEQ ID NO: 8; each
start position is specified,
the length of peptide is 9
amino acids, and the end
position for each peptide
is the start position plus
eight.

| | | |
|---|---|---|
| Pos | 123456789 | score |

| | | |
|---|---|---|
| 8 | DLAQWEPVL | 22 |
| 1 | ASVPLLTDL | 19 |
| 4 | PLLTDLAQW | 15 |
| 2 | SVPLLTDLA | 13 |
| 5 | LLTDLAQWE | 13 |
| 7 | TDLAQWEPV | 12 |

[1122] TABLE XXIII

V22-HLA-
A0201-9mers-PSCA
Each peptide is a portion
of SEQ ID NO: 8; each
start position is specified,
the length of peptide is 9
amino acids, and the end
position for each peptide
is the start position plus
eight.

| | | |
|---|---|---|
| Pos | 123456789 | score |

| | | |
|---|---|---|
| 8 | HLAQWEPVL | 23 |
| 1 | ASVPLLTHL | 19 |
| 9 | LAQWEPVLV | 18 |
| 4 | PLLTHLAQW | 15 |
| 2 | SVPLLTHLA | 14 |
| 5 | LLTHLAQWE | 12 |
| 7 | THLAQWEPV | 12 |

[1123] TABLE XXIII

V24-HLA-
A0201-9mers-PSCA
Each peptide is a portion
of SEQ ID NO: 8; each
start position is specified,
the length of peptide is 9
amino acids, and the end
position for each peptide
is the start position plus
eight.

| Pos | 123456789 | score |
|---|---|---|
| 2 | SLTMYVCTP | 18 |
| 3 | LTMYVCTPV | 16 |
| 4 | TMYVCTPVP | 12 |
| 6 | YVCTPVPHP | 12 |
| 1 | ASLTMYVCT | 10 |

[1124] TABLE XXIII

V25-HLA-
A0201-9mers-PSCA
Each peptide is a
portion of SEQ ID NO:
8; each start position is
specified, the length of
peptide is 9 amino
acids, and the end
position for each
peptide is the start
position plus eight.

| | | |
|---|---|---|
| Pos | 123456789 | score |

| | | |
|---|---|---|
| 3 | TPTRQISSI | 13 |
| 9 | SSSDTDPPA | 10 |
| 6 | RQISSIDTD | 8 |
| 7 | QISSIDTDP | 8 |
| 2 | RTPTRQISS | 6 |

[1125] TABLE XXIII

V25&26-HLA-
A0201-9mers-PSCA
Each peptide is a portion
of SEQ ID NO: 8; each
start position is specified,
the length of peptide is 9
amino acids, and the end
position for each peptide
is the start position plus
eight.

| | | |
|---|---|---|
| Pos | 123456789 | score |

| | | |
|---|---|---|
| 5 | QISSSDTDP | 8 |
| 7 | SSSDTQPPA | 8 |
| 1 | TPTRQISSS | 5 |
| 3 | TRQISSSDT | 4 |
| 4 | RQISSSDTD | 4 |
| 6 | ISSSDTDPP | 4 |
| 2 | PTRQISSSD | 3 |
| 5 | QIGSSDTDP | 8 |
| 7 | GSSDTDPPA | 7 |
| 3 | TRQIGSSDT | 6 |
| 4 | RQIGSSDTD | 6 |
| 1 | TPTRQIGSS | 5 |
| 9 | SDTDPPADG | 5 |
| 6 | IGSSDTDPP | 4 |
| 8 | SSDTDEPAD | 4 |
| 2 | PTRQIGSSD | 3 |

[1126] TABLE XXIII

V27-HLA-
A0201-9mers-PSCA
Each peptide is a portion
of SEQ ID NO: 8; each
start position is specified,
the length of peptide is 9
amino acids, and the end
position for each peptide
is the start position plus
eight.

| | | |
|---|---|---|
| Pos | 123456789 | score |

| | | |
|---|---|---|
| 1 | SRGQALRRA | 10 |

[1127] TABLE XXIV

V1-HLA-
A0203-9mers-PSCA

| | | |
|---|---|---|
| Pos | 123456789 | score |

NoResultsFound.

[1128] TABLE XXIV

V4-HLA-
A0203-9mers-PSCA

| | | |
|---|---|---|
| Pos | 123456789 | score |

NoResultsFound.

[1129] TABLE XXIV

V19-HLA-
A0203-9mers-PSCA

| | | |
|---|---|---|
| Pos | 123456789 | score |

NoResultsFound.

[1130] TABLE XXIV

V20-HLA-
A0203-9mers-PSCA

| | | |
|---|---|---|
| Pos | 123456789 | score |

NoResultsFound.

[1131] TABLE XXIV

V21-HLA-
A0203-9mers-PSCA

| | | |
|---|---|---|
| Pos | 123456789 | score |

NoResultsFound.

[1132] TABLE XXIV

V21&22-
HLA-A0203-9mers-
PSCA

| | | |
|---|---|---|
| Pos | 123456789 | score |

NoResultsFound.

[1133] TABLE XXIV

V22-HLA-
A0203-9mers-PSCA

| | | |
|---|---|---|
| Pos | 123456789 | score |

NoResultsFound.

[1134] TABLE XXIV

V24-HLA-
A0203-9mers-PSCA

| | | |
|---|---|---|
| Pos | 123456789 | score |

NoResultsFound.

[1135] TABLE XXIV

V25-HLA-
A0203-9mers-PSCA

| | | |
|---|---|---|
| Pos | 123456789 | score |

NoResultsFound.

[1136] TABLE XXIV

V25&26-
HLA-A0203-9mers-
PSCA

| | | |
|---|---|---|
| Pos | 123456789 | score |

NoResultsFound.

[1137] TABLE XXIV

V26-HLA-
A0203-9mers-PSCA

| | | |
|---|---|---|
| Pos | 123456789 | score |

NoResultsFound.

[1138] TABLE XXIV

V1-HLA-A3-
9mers-PSCA
Each peptide is a portion
of SEQ ID NO: 2; each
start position is specified,
the length of peptide is 9
amino acids, and the end
position for each peptide
is the start position plus
eight.

| | | |
|---|---|---|
| Pos | 123456789 | score |

| | | |
|---|---|---|
| 52 | RIRAVGLLT | 24 |
| 7 | ALLMAGLAL | 22 |
| 99 | ALQPAAAIL | 22 |
| 14 | ALQPGTALL | 21 |
| 3 | AVLLALLMA | 20 |
| 60 | TVISKGCSL | 19 |
| 108 | ALLPALGLL | 19 |
| 115 | LLLWGPGQL | 19 |
| 12 | GLALQPGTA | 18 |
| 55 | AVGLLTVIS | 18 |
| 106 | ILALLPALG | 18 |
| 109 | LLPALGLLL | 18 |
| 8 | LLMAGLALQ | 17 |
| 43 | QLGEQCWTA | 17 |
| 70 | CVDDSQDYY | 17 |
| 90 | DLCNASGAH | 17 |
| 4 | VLLALLMAG | 16 |
| 19 | TALLCYSCK | 16 |
| 57 | GLLTVISKG | 16 |
| 105 | AILALLPAL | 16 |
| 114 | GLLLWGPGQ | 16 |
| 5 | LLALLMAGL | 15 |
| 20 | ALLCYSCKA | 15 |
| 56 | VGLLTVISK | 15 |
| 73 | DSQDYYVGK | 15 |
| 78 | YVGKKNITC | 15 |
| 35 | CLQVENCTQ | 14 |
| 67 | SLNCVDDSQ | 14 |
| 94 | ASGAHALQP | 14 |
| 112 | ALGLLLWGP | 14 |
| 29 | QVSNEDCLQ | 13 |
| 37 | QVENCTQLG | 13 |
| 50 | TARIRAVGL | 13 |
| 61 | VISKGCSLN | 13 |
| 9 | LMAGLALQP | 12 |
| 49 | WTARIRAVG | 12 |
| 53 | IRAVGLLTV | 12 |
| 74 | SQDYYVGKK | 12 |
| 16 | QPGTALLCY | 11 |
| 21 | LLCYSCKAQ | 11 |
| 54 | RAYGLLTVI | 11 |
| 103 | AAAILALLP | 11 |

[1139] TABLE XXV

V4-HLA-A3-
9mers-PSCA
Each peptide is a portion
of SEQ ID NO: 8; each
start position is specified,
the length of peptide is 9
amino acids, and the end
position for each peptide
is the start position plus
eight

| | | |
|---|---|---|
| Pos | 123456789 | score |

| | | |
|---|---|---|
| 15 | AVTPTCATP | 23 |
| 53 | RLWGAPLQP | 23 |
| 64 | GVVPQASVP | 23 |
| 173 | SVVSPAPSR | 20 |
| 72 | PLLTHPAQW | 19 |
| 58 | PLQPTLGVV | 18 |
| 110 | ALSRTPTRQ | 18 |
| 167 | DLSQVWSVV | 18 |
| 10 | RRTSRATVP | 17 |
| 31 | RLPPSLRCS | 17 |
| 164 | PIYDLSQVS | 17 |
| 174 | VVSPAPSRG | 17 |
| 35 | SLRCSLHSA | 16 |
| 83 | VLVPEAHPN | 16 |
| 150 | VLRHLFPQE | 16 |
| 153 | HLFPQEAFP | 16 |
| 170 | QVWSVVSPA | 16 |
| 82 | PVLVPEAHP | 15 |
| 105 | PDPPMALSR | 15 |
| 149 | PVLRHLFPQ | 15 |
| 178 | APSRGQALR | 15 |
| 179 | PSRGQALRR | 15 |
| 9 | ARRTSRAVT | 14 |
| 44 | CCSGDPASY | 14 |
| 65 | VVPQASVPL | 14 |
| 73 | LLTHPAQWE | 14 |
| 146 | TLNPVLRHL | 14 |
| 39 | SLHSACCSG | 13 |
| 62 | TLGVVPQAS | 13 |
| 68 | QASVPLLTH | 13 |
| 117 | RQIGSIDTD | 13 |
| 6 | TTWARRTSR | 12 |
| 29 | CSRLPPSLR | 12 |
| 50 | ASYRLWGAP | 12 |
| 70 | SVELLIHPA | 12 |
| 93 | SLTMYVCAP | 12 |
| 97 | YVCAPMRHP | 12 |
| 109 | MALSRIETR | 12 |
| 181 | RGQALRRAR | 12 |
| 45 | CSGDPASYR | 11 |
| 51 | SYRLWGAPL | 11 |
| 59 | LQPTLGVVP | 11 |
| 78 | AQWEPVLVP | 11 |
| 84 | LVPEAHPNA | 11 |
| 88 | AHPNASLTM | 11 |
| 95 | TMYVCAPVP | 11 |
| 118 | QIGSIDTDP | 11 |
| 121 | SIDTDPPAD | 11 |
| 145 | STLNPVLRH | 11 |
| 152 | RHLFPQEAF | 11 |

[1140] TABLE XXV

V19-HLA-A3-
9mers-PSCA
Each peptide is a
portion of SEQ ID NO:
8; each start position is
specified, the length of
peptide is 9 amino
acids, and the end
position for each peptide
is the start position plus
eight.

| | | |
|---|---|---|
| Pos | 123456789 | score |

| | | |
|---|---|---|
| 7 | RLLPSLRCS | 19 |
| 8 | LLPSLRCSL | 13 |
| 5 | CSRLLPSLR | 12 |
| 9 | LPSLRCSLH | 10 |

[1141] TABLE XXV

V20-HLA-A3-
9mers-PSCA
Each peptide is a portion
of SEQ ID NO: 8; each
start position is specified,
the length of peptide is 9
amino acids, and the end
position for each peptide
is the start position plus
eight.

| | | |
|---|---|---|
| Pos | 123456789 | score |

| | | |
|---|---|---|
| 2 | CSGDPASSR | 13 |
| 8 | SSRLWGAPL | 11 |
| 1 | CCSGDPASS | 8 |
| 7 | ASSRLWGAP | 8 |
| 9 | SRLWGAELQ | 8 |
| 3 | SGDPASSRL | 7 |
| 5 | DPASSRLWG | 13 |

[1142] TABLE XXV

V21-HLA-A3-
9mers-PSCA
Each peptide is a portion
of SEQ ID NO: 8; each
start position is specified,
the length of pepfide is 9
amino acids, and the end
position for each peptide
is the start position plus
eight.

| | | |
|---|---|---|
| Pos | 123456789 | score |

| | | |
|---|---|---|
| 5 | PLLTDPAQW | 19 |
| 6 | LLTDPAQWE | 15 |
| 3 | SVPLLTDPA | 12 |
| 1 | QASVPLLTD | 9 |

[1143] TABLE XXV

V21&22-HLA-
A3-9mers-PSCA
Each peptide is a portion
of SEQ ID NO: 8; each
start position is specified,
the length of peptide is 9
amino acids, and the end
position for each peptide
is the start position plus
eight.

| | | |
|---|---|---|
| Pos | 123456789 | score |

| | | |
|---|---|---|
| 4 | PLLTDLAQW | 18 |
| 5 | LLTDLAQWE | 15 |
| 8 | DLAQWEPVL | 15 |
| 2 | SVPLLTDLA | 12 |

[1144] TABLE XXV

V22-HLA-A3-
9mers-PSCA
Each peptide is a portion
of SEQ ID NO: 8; each
start position is specified,
the length of peptide is 9
amino acids, and the end
position for each peptide
is the start position plus
eight.

| | | |
|---|---|---|
| Pos | 123456789 | score |

| | | |
|---|---|---|
| 4 | PLLTHLAQW | 18 |
| 8 | HLAQWEPVL | 15 |
| 5 | LLTHLAQWE | 14 |
| 2 | SVPLLIHLA | 12 |

[1145] TABLE XXV

V24-HLA-A3-
9mers-PSCA
Each peptide is a portion
of SEQ ID NO: 8; each
start position is specified,
the lenght of peptide is 9
amino acids, and the end
position for each peptide
is the start position plus
eight.

| Pos | 123456789 | score |
|---|---|---|
| 2 | SLTMYVCTP | 15 |
| 6 | YVCTPVPHP | 10 |
| 1 | ASLTMYVCT | 9 |
| 5 | MYVCTPVPH | 9 |
| 4 | TMYVCTPVP | 8 |

[1146] TABLE XXV

V25-HLA-A3-
9mers-PSCA
Each peptide is a
portion of SEQ ID NO:
8; each start position is
specified, the length of
peptide is 9 amino
acids, and the end
position for each
peptide is the start
position plus eight.

| | | |
|---|---|---|
| Pos | 123456789 | score |

| | | |
|---|---|---|
| 6 | RQISSIDTD | 11 |
| 7 | QISSIDTDP | 11 |
| 2 | RTPTRQISS | 8 |
| 3 | TPTRQISSI | 8 |
| 4 | PTRQISSID | 6 |
| 1 | SRTPTRQIS | 5 |
| 9 | SSIDTDPPA | 5 |

[1147] TABLE XXV

V25&26-
HLA-A3-9mers-PSCA
Each peptide is a
portion of SEQ ID NO:
8; each start position is
specified, the length of
peptide is 9 amino
acids, and the end
position for each peptide
is the start position plus
eight.

| | | |
|---|---|---|
| Pos | 123456789 | score |

| | | |
|---|---|---|
| 4 | RQISSSDTD | 11 |
| 5 | QISSSDTDP | 11 |
| 1 | TPTRQISSS | 8 |
| 2 | PTRQISSSD | 8 |

[1148] TABLE XXV

V26-HLA-A3-
9mers-PSCA
Each peptide is a portion
of SEQ ID NO: 8; each
start position is specified,
the length of peptide is 9
amino acids, and the end
position for each peptide
is the start position plus
eight

| | | |
|---|---|---|
| Pos | 123456789 | score |

| | | |
|---|---|---|
| 4 | RQIGSSDTD | 13 |
| 2 | PTRQIGSSD | 11 |
| 5 | QIGSSDTDP | 11 |
| 1 | TPTRQIGSS | 6 |
| 3 | TRQIGSSDT | 6 |
| 9 | SDTDPEADG | 6 |

[1149] TABLE XXV

V27-HLA-A3-
9mers-PSCA
Each peptide is a portion
of SEQ ID NO: 8; each
start position is specified,
the length of peptide is 9
amino acids, and the end
position for each peptide
is the start position plus
eight.

| | | |
|---|---|---|
| Pos | 123456789 | score |

| | | |
|---|---|---|
| 2 | RGQALRRAQ | 8 |

[1150] TABLE XXVi

V1-HLA-A26-
9mers-PSCA
Each peptide is a portion
of SEQ ID NO: 2; each
start position is specified,
the length of peptide is 9
amino acids, and the end
position for each peptide
is the start position plus
eight.

| | | |
|---|---|---|
| Pos | 123456789 | score |

| | | |
|---|---|---|
| 60 | TVISKGCSL | 27 |
| 70 | CVDDSQDYY | 21 |
| 105 | AILALLPAL | 18 |
| 51 | ARIRAVGLL | 17 |
| 88 | DTDLCNASG | 17 |
| 3 | AVLLALLMA | 16 |
| 36 | LQVENCTQL | 16 |
| 16 | QPGTALLCY | 15 |
| 39 | ENCTQLGEQ | 15 |
| 69 | NCVDDSQDY | 15 |
| 28 | AQVSNEDCL | 14 |
| 33 | EDCLQVENC | 14 |
| 101 | QPAAAILAL | 14 |
| 102 | PAAAILALL | 14 |
| 108 | ALLPALGLL | 14 |
| 1 | MKAVLLALL | 13 |
| 59 | LTVISKGCS | 13 |
| 78 | YVGKKNITC | 13 |
| 83 | NITDCDTDL | 13 |

[1151] TABLE XXvi

V1-HLA-A26-
9mers-PSCA
Each peptide is a portion
of SEQ ID NO: 8; each
start position is specified,
the length of peptide is 9
amino acids, and the end
position for each peptide
is the start position plus
eight.

| | | |
|---|---|---|
| Pos | 123456789 | score |

| | | |
|---|---|---|
| 158 | EAFPAHPIY | 25 |
| 65 | VVPQASVPL | 18 |
| 123 | DTDPPADGP | 17 |
| 173 | SVVSPAPSR | 17 |
| 64 | GVVPQASVP | 16 |
| 170 | QVWSVVSPA | 16 |
| 81 | EPVLVPEAH | 15 |
| 89 | HPNASLTMY | 15 |
| 97 | YVCAPVPHP | 14 |
| 145 | STLNPVLRH | 14 |
| 146 | TLNPVLRHL | 14 |
| 149 | PVLRHLFPQ | 14 |
| 15 | AVTPTCATP | 13 |
| 61 | PTLGVVPQA | 13 |
| 87 | EAHPNASLT | 13 |
| 106 | DPPMALSRT | 13 |
| 11 | RTSRAVTPT | 12 |
| 66 | VPQASVPLL | 12 |
| 70 | SVPLLTHPA | 12 |
| 84 | LVPEAHPNA | 12 |
| 115 | PRTQIGSID | 12 |
| 160 | FPAHPIYDL | 12 |
| 174 | VVSPAPSRG | 12 |

[1152] TABLE XXVi

V19-HLA-
A26-9mers-PSCA
Each peptide is a portion
of SEQ ID NO: 8; each
start position is specified,
the length of peptide is 9
amino acids, and the end
position for each peptide
is the start position plus
eight.

| | | |
|---|---|---|
| Pos | 123456789 | score |

| | | |
|---|---|---|
| 4 | PCSRLLPSL | 14 |
| 8 | LLPSLRCSL | 11 |
| 1 | GPMPCSRLL | 9 |
| 3 | MPCSRLLPS | 6 |

[1153] TABLE XXVi-V4

HLA-A26-9mers-PSCA
Each peptide is a portion of SEQ ID NO: 8; each
start position is specified, the length of peptide
is 9 amino acids, and the end position for each
peptide is the start position plus eight.

| | | |
|---|---|---|
| Pos | 123456789 | score |

| | | |
|---|---|---|
| 158 | EAFPAHPIY | 25 |
| 65 | VVPQASVPL | 18 |
| 123 | DTDPPADGP | 17 |
| 173 | SVVSPAPSR | 17 |
| 64 | GVVPQASVP | 16 |
| 170 | QVWSVVSPA | 16 |
| 81 | EPVLVPEAH | 15 |
| 89 | HPNASLTMY | 15 |
| 97 | YVCAPVPHP | 14 |
| 145 | STLNPVLRH | 14 |
| 146 | TLNPVLRHL | 14 |
| 149 | PVLRHLFPQ | 14 |
| 15 | AVTPTCATP | 13 |
| 61 | PTLGVVPQA | 13 |
| 87 | EAHPNASLT | 13 |
| 106 | DPPMALSRT | 13 |
| 11 | RTSRAVTPT | 12 |
| 66 | VPQASVPLL | 12 |
| 70 | SVPLLTHPA | 12 |
| 84 | LVPEAHPNA | 12 |
| 115 | PTRQIGSID | 12 |
| 160 | FPAHPIYDL | 12 |
| 174 | VVSPAPSRG | 12 |

[1154] TABLE XXVi-V21

HLA-A26-9mers-PSCA
Each peptide is a portion of SEQ ID NO: 8; each
start position is specified, the length of peptide
is 9 amino acids, and the end position for each
peptide is the start position plus eight.

| | | |
|---|---|---|
| Pos | 123456789 | score |

| | | |
|---|---|---|
| 9 | DPAQWEPVL | 16 |
| 3 | SVPLLTDPA | 12 |
| 2 | ASVPLLTDP | 10 |
| 7 | LTDPAQWEP | 9 |

[1155] TABLE XXVi-V21 & 22

HLA-A26-9mers-PSCA
Each peptide is a portion of SEQ ID NO: 8; each
start position is specified, the length of peptide
is 9 amino acids, and the end position for each
peptide is the start position plus eight.

| | | |
|---|---|---|
| Pos | 123456789 | score |

| | | |
|---|---|---|
| 1 | ASVPLLTDL | 18 |
| 8 | DLAQWEPVL | 16 |
| 2 | SVPLLTDLA | 12 |
| 6 | LTDLAQWEP | 8 |

[1156] TABLE XXVi-V22

HLA-A26-9mers-PSCA
Each peptide is a portion of SEQ ID NO: 8; each
start position is specified, the length of peptide
is 9 amino acids, and the end position for each
peptide is the start position plus eight.

| | | |
|---|---|---|
| Pos | 123456789 | score |

| | | |
|---|---|---|
| 1 | ASVPLLTHL | 18 |
| 2 | SVPLLTHLA | 12 |
| 6 | LTHLAQWEP | 8 |
| 8 | HLAQWEPVL | 8 |

[1157] TABLE XXVi-V24

HLA-A26-9mers-PSCA
Each peptide is a portion of SEQ ID NO: 8; each
start position is specified, the length of peptide
is 9 amino acids, and the end position for each
peptide is the start position plus eight.

| | | |
|---|---|---|
| Pos | 123456789 | score |

| | | |
|---|---|---|
| 6 | YVCTPVPHP | 14 |
| 3 | LTMYVCTPV | 8 |
| 8 | CTPVPHPDP | 8 |
| 2 | SLTMYVCTP | 7 |

[1158] TABLE XXVi-V25

HLA-A26-9mers-PSCA
Each peptide is a portion of SEQ ID NO: 8; each
start position is specified, the length of peptide
is 9 amino acids, and the end position for each
peptide is the start position plus eight.

| | | |
|---|---|---|
| Pos | 123456789 | score |

| | | |
|---|---|---|
| 4 | PTRQISSID | 11 |
| 2 | RTPTRQISS | 10 |
| 6 | RQISSIDTD | 10 |
| 3 | TPTRQISSI | 8 |
| 7 | QISSIDTDP | 7 |
| 9 | SSIDTDPPA | 6 |

[1159] TABLE XXVi-V25 & 26

HLA-A26-9mers-PSCA
Each peptide is a portion of SEQ ID NO: 8; each
start position is specified, the length of peptide
is 9 amino acids, and the end position for each
peptide is the start position plus eight.

| | | |
|---|---|---|
| Pos | 123456789 | score |

| | | |
|---|---|---|
| 2 | PTRQISSSD | 12 |
| 1 | TPTRQISSS | 8 |
| 4 | RQISSSDTD | 6 |
| 5 | QISSSDTDP | 5 |

[1160] TABLE XXVi-V26

HLA-A26-9mers-PSCA
Each peptide is a portion of SEQ ID NO: 8; each
start position is specified, the length of peptide
is 9 amino acids, and the end position for each
peptide is the start position plus eight.

| | | |
|---|---|---|
| Pos | 123456789 | score |

| | | |
|---|---|---|
| 2 | PTRQIGSSD | 13 |
| 1 | TPTRQIGSS | 8 |

[1161] TABLE XXVi-V27

HLA-A26-9mers-PSCA
Each peptide is a portion of SEQ ID NO: 8; each
start position is specified, the length of peptide
is 9 amino acids, and the end position for each
peptide is the start position plus eight.

| Pos | 123456789 | score |
|---|---|---|
| 1 | SRGQALRRA | 5 |

[1162] TABLE XXVII-V1

HLA-B0702-9mers-PSCA
Each peptide is a portion of SEQ ID NO: 2; each
start position is specified, the length of peptide
is 9 amino acids, and the end position for each
peptide is the start position plus eight.

| | | |
|---|---|---|
| Pos | 123456789 | score |

| | | |
|---|---|---|
| 101 | QPAAAILAL | 25 |
| 7 | ALLMAGLAL | 16 |
| 13 | LALQPGTAL | 16 |
| 14 | ALQPGTALL | 15 |
| 105 | AILALLPAL | 15 |
| 107 | LALLPALGL | 15 |
| 50 | TARIRAVGL | 14 |
| 99 | ALQPAAAIL | 14 |
| 109 | LLPALGLLL | 14 |
| 16 | QPGTALLCY | 13 |
| 51 | ARIRAVGLL | 13 |
| 52 | RIRAVGLLT | 13 |
| 102 | PAAAILALL | 13 |
| 108 | ALLPALGLL | 13 |
| 110 | LPALGLLLW | 13 |
| 1 | MKAVLLALL | 12 |
| 5 | LLALLMAGL | 12 |
| 28 | AQVSNEDCL | 12 |
| 92 | CNASGAHAL | 12 |

[1163] TABLE XXVII

V4-HLA-
B0702-9mers-PSCA
Each peptide is a portion
of SEQ ID NO: 8; each
start position is specified,
the length of peptide is 9
amino acids, and the end
position for each peptide
is the start position plus
eight.

| | | |
|---|---|---|
| Pos | 123456789 | score |

| | | |
|---|---|---|
| 57 | APLQPTLGV | 24 |
| 160 | FPAHPIYDL | 24 |
| 66 | VPQASVPLL | 23 |
| 76 | HPAQWEPVL | 23 |
| 32 | LPPSLRCSL | 21 |
| 76 | SPAPSRGQA | 19 |
| 102 | VPHPDPPMA | 18 |
| 22 | TPAGPMPCS | 17 |
| 127 | PADGPSNPL | 17 |
| 104 | HPDPPMALS | 16 |
| 106 | DPPMALSRT | 16 |
| 114 | TPTRQIGSI | 16 |
| 143 | AFSTLNPVL | 16 |
| 163 | HPIYDLSQV | 16 |
| 24 | AGPMPCSRL | 15 |
| 51 | SYRLWGAPL | 15 |
| 86 | PEAHPNASL | 15 |
| 130 | GPSNPLCCC | 15 |
| 178 | APSRGQALR | 15 |
| 48 | DPASYRLWG | 14 |
| 60 | QPTLGVVPQ | 14 |
| 100 | APVPHPDPP | 14 |
| 103 | PHPOPPMAL | 14 |
| 141 | GPAFSTLNP | 14 |
| 9 | ARRTSRAVT | 13 |
| 17 | TPTCATPAG | 13 |
| 28 | PCSRLPPSL | 13 |
| 55 | WGAPLQPTL | 13 |
| 65 | VVPQASVPL | 13 |
| 125 | DPPADGPSN | 13 |
| 139 | FHGPAFSTL | 13 |
| 148 | NPVLRHLFP | 13 |
| 155 | FPQEAFPAH | 13 |
| 11 | RTSRAVTPT | 12 |
| 14 | RAVTPTCAT | 12 |
| 25 | GPMPCSRLP | 12 |
| 27 | MPCSRLPPS | 12 |
| 33 | PPSLRCSLH | 12 |
| 46 | SGDPASYRL | 12 |
| 54 | LWGAPLQPT | 12 |
| 71 | VPLLTHPAQ | 12 |
| 81 | EPVLVPEAH | 12 |
| 85 | VPEAHPNAS | 12 |
| 89 | HPNASLTMY | 12 |
| 107 | PPMALSRTP | 12 |
| 111 | LSRTPTRQI | 12 |
| 177 | PAPSRGQAL | 12 |
| 19 | TCATPAGPM | 11 |
| 101 | PVPHPDPPM | 11 |
| 126 | PPADGPSNP | 11 |
| 138 | CFHGPAFST | 11 |
| 146 | TLNPVLRHL | 11 |
| 152 | RHLFPQEAF | 11 |
| 157 | QEAFPAHPI | 11 |

[1164] TABLE XXVII-V19

HLA-B0702-9mers-PSCA
Each peptide is a portion of SEQ ID NO: 8; each
start position is specified, the length of peptide
is 9 amino acids, and the end position for each
peptide is the start position plus eight.

| | | |
|---|---|---|
| Pos | 123456789 | score |

| | | |
|---|---|---|
| 1 | GPMPCSRLL | 22 |
| 3 | MPCSRLLPS | 13 |
| 4 | PCSRLLPSL | 13 |
| 9 | LPSLRCSLH | 12 |
| 8 | LLPSLRCSL | 11 |

[1165] TABLE XXVII-V20

HLA-B0702-9mers-PSCA
Each peptide is a portion of SEQ ID NO: 8; each
start position is specified, the length of peptide
is 9 amino acids, and the end position for each
peptide is the start position plus eight.

| | | |
|---|---|---|
| Pos | 123456789 | score |

| | | |
|---|---|---|
| 8 | SSRLWGAPL | 15 |
| 5 | DPASSRLWG | 14 |
| 3 | SGDPASSRL | 12 |
| 6 | PASSRLWGA | 8 |

[1166] TABLE XXVII-V21

HLA-B0702-9mers-PSCA
Each peptide is a portion of SEQ ID NO: 8; each
start position is specified, the length of peptide
is 9 amino acids, and the end position for each
peptide is the start position plus eight.

| | | |
|---|---|---|
| Pos | 123456789 | score |

| | | |
|---|---|---|
| 9 | DPAQWEPVL | 23 |
| 4 | VPLLTDPAQ | 12 |

[1167] TABLE XXVII-V21 & 22

HLA-B0702-9mers-PSCA
Each peptide is a portion of SEQ ID NO: 8; each
start position is specified, the length of peptide
is 9 amino acids, and the end position for each
peptide is the start position plus eight.

| | | |
|---|---|---|
| Pos | 123456789 | score |

| | | |
|---|---|---|
| 1 | ASVPLLTDL | 14 |
| 3 | VPLLTDLAQ | 13 |
| 8 | DLAQWEPVL | 13 |
| 7 | TDLAQWEPV | 8 |
| 2 | SVPLLTDLA | 7 |

[1168] TABLE XXVII-V22

HLA-B0702-9mers-PSCA
Each peptide is a portion of SEQ ID NO: 8; each
start position is specified, the length of peptide
is 9 amino acids, and the end position for each
peptide is the start position plus eight.

| | | |
|---|---|---|
| Pos | 123456789 | score |

| | | |
|---|---|---|
| 1 | ASVPLLTHL | 14 |
| 3 | VPLLTHLAQ | 13 |
| 8 | HLAQWEPVL | 13 |
| 7 | THLAQWEPV | 8 |
| 9 | LAQWEPVLV | 8 |
| 2 | SVPLLTHLA | 7 |

[1169] TABLE XXVII

V24-HLA-
B0702-9mers-PSCA
Each peptide is a portion
of SEQ ID NO: 8; each
start position is specified,
the length of peptide is 9
amino acids, and the end
position for each peptide
is the start position plus
eight.

| | | |
|---|---|---|
| Pos | 123456789 | score |

| | | |
|---|---|---|
| 1 | ASLTMYVCT | 10 |
| 3 | LTMYVCTPV | 9 |
| 6 | YVCTPVPHP | 5 |
| 8 | CTPVPHPDP | 4 |

[1170] TABLE XXVII

V25&26-
B0702-9mers-PSCA
Each peptide is a
portion of SEQ ID NO:
8; each start position is
specified, the length of
peptide is 9 amino
acids, and the end
position for each
peptide is the start
position plus eight.

| | | |
|---|---|---|
| Pos | 123456789 | score |

| | | |
|---|---|---|
| 1 | TPTRQISSS | 10 |
| 7 | SSSDTDPPA | 10 |
| 3 | TRQOSSSDT | 6 |
| 6 | ISSSDTDPP | 5 |

[1171] TABLE XXVII

V26-HLA-
B0702-9mers-PSCA
Each peptide is a portion
of SEQ ID NO: 8; each
start position is specified,
the length of peptide is 9
amino acids, and the end
position for each peptide
is the start position plus
eight.

| | | |
|---|---|---|
| Pos | 123456789 | score |

| | | |
|---|---|---|
| 1 | TPTRQIGSS | 10 |
| 7 | GSSDTDPPA | 10 |
| 3 | TRQIGSSDT | 6 |
| 6 | IGSSDTDPP | 5 |
| 9 | SDTDPPADG | 4 |

[1172] TABLE XXVII

V25-HLA-
B0702-9mers-PSCA
Each peptide is a portion
of SEQ ID NO: 8; each
start position is specified,
the length of peptide is 9
amino acids, and the end
position for each peptide
is the start position plus
eight.

| | | |
|---|---|---|
| Pos | 123456789 | score |

| | | |
|---|---|---|
| 3 | TPTRQISSI | 16 |
| 9 | SSIDTDPPA | 8 |

[1173] TABLE XXVII

V27-HLA-
B0702-9mers-PSCA
Each peptide is a portion
of SEQ ID NO: 8; each
start position is specified,
the length of peptide is 9
amino acids, and the end
position for each peptide
is the start position plus
eight.

| | | |
|---|---|---|
| Pos | 123456789 | score |

| | | |
|---|---|---|
| 1 | SRGQALRRA | 7 |

[1174] TABLE XXVIII

V1-HLA-
B08-9mers-PSCA
Each peptide is a portion
of SEQ ID NO: 2; each
start position is specified,
the length of peptide is 9
amino acids, and the end
position for each peptide
is the start position plus
eight.

| | | |
|---|---|---|
| Posi | 123456789 | score |

| | | |
|---|---|---|
| 50 | TARIRAVGL | 29 |
| 60 | TVISKGCSL | 20 |
| 101 | QPAAAILAL | 18 |
| 5 | LLALLMAGL | 17 |
| 7 | ALLMAGLAL | 17 |
| 14 | ALQPGTALL | 16 |
| 99 | ALQPAAAIL | 16 |
| 108 | ALLPALGLL | 16 |
| 109 | LLPALGLLL | 16 |
| 115 | LLLWGPGQL | 16 |
| 13 | LALQPGTAL | 15 |
| 105 | AILALLPAL | 15 |
| 107 | LALLPALGL | 15 |
| 83 | NITCCDTDL | 14 |
| 102 | PAAAILALL | 14 |

[1175] TABLE XXVIII

V4-HLA-
B08-9mers-PSCA
Each peptide is a portion
of SEQ ID NO: 8; each
start position is specified,
the length of peptide is 9
amino acids, and the end
position for each peptide
is the start position plus
eight.

| | | |
|---|---|---|
| Pos | 123456789 | score |

| | | |
|---|---|---|
| 177 | PAPSRGQAL | 23 |
| 51 | SYRLWGAPL | 19 |
| 66 | VPQASVPLL | 18 |
| 160 | FPAHPIYDL | 18 |
| 76 | HPAQWEPVL | 17 |
| 32 | LPPSLRCSL | 16 |
| 146 | TLNPVLRHL | 16 |
| 33 | PPSLRCSLH | 15 |
| 148 | NPVLRHLFP | 15 |
| 27 | MPCSRLPPS | 14 |
| 35 | SLRCSLHSA | 14 |
| 127 | PADGPSNPL | 14 |
| 49 | PASYRLWGA | 13 |
| 114 | TPTRQIGSI | 13 |
| 150 | VLRHLFPQE | 13 |
| 46 | SGDPASYRL | 12 |
| 65 | VVPQASVPL | 12 |
| 109 | MALSRTPTR | 12 |
| 111 | LSRTPTRQI | 12 |
| 8 | WARRTSRAV | 11 |
| 86 | PEAHPNASL | 11 |
| 103 | PHPDPPMAL | 11 |
| 139 | FHGPAFSTL | 11 |
| 143 | AFSTLNPVL | 11 |

[1176] TABLE XXVIII-V19

HLA-B08-9mers-PSCA
Each peptide is a portion of SEQ ID NO: 8; each
start position is specified, the length of peptide
is 9 amino acids, and the end position for each
peptide is the start position plus eight.

| | | |
|---|---|---|
| Pos | 123456789 | score |

| | | |
|---|---|---|
| 1 | GPMPCSRLL | 17 |
| 8 | LLPSLRCSL | 16 |
| 9 | LPSLRSCLH | 15 |
| 3 | MPCSRLLPS | 14 |
| 4 | PCSRLLPSL | 10 |

[1177] TABLE XXVIII-V20

HLA-B08-9mers-PSCA
Each peptide is a portion of SEQ ID NO: 8; each
start position is specified, the length of peptide
is 9 amino acids, and the end position for each
peptide is the start position plus eight.

| | | |
|---|---|---|
| Pos | 123456789 | score |

| | | |
|---|---|---|
| 8 | SSRLWGAPL | 19 |
| 3 | SGDPASSRL | 12 |
| 6 | PASSRLWGA | 12 |

[1178] TABLE XXVIII-V21

HLA-B08-9mers-PSCA
Each peptide is a portion of SEQ ID NO: 8; each
start position is specified, the length of peptide
is 9 amino acids, and the end position for each
peptide is the start position plus eight.

| | | |
|---|---|---|
| Pos | 123456789 | score |

| | | |
|---|---|---|
| 9 | DPAQWEPVL | 16 |
| 4 | VPLLTDPAQ | 9 |

[1179] TABLE XXVIII-V21 & 22

HLA-B08-9mers-PSCA
Each peptide is a portion of SEQ ID NO: 8; each
start position is specified, the length of peptide
is 9 amino acids, and the end position for each
peptide is the start position plus eight.

| | | |
|---|---|---|
| Pos | 123456789 | score |

| | | |
|---|---|---|
| 8 | DLAQWEPVL | 16 |
| 1 | ASVPLLTDL | 10 |
| 3 | VPLLTDLAQ | 9 |

[1180] TABLE XXVIII-V22

HLA-B08-9mers-PSCA
Each peptide is a portion of SEQ ID NO: 8; each
start position is specified, the length of peptide
is 9 amino acids, and the end position for each
peptide is the start position plus eight.

| | | |
|---|---|---|
| Pos | 123456789 | score |

| | | |
|---|---|---|
| 8 | HLAQWEPVL | 17 |
| 1 | ASVPLLTHL | 10 |
| 3 | VPLLTHLAQ | 9 |

[1181] TABLE XXVIII-V24

HLA-B08-9mers-PSCA
Each peptide is a portion of SEQ ID NO: 8; each
start position is specified, the length of peptide
is 9 amino acids, and the end position for each
peptide is the start position plus eight.

| Pos | 123456789 | score |
|---|---|---|
| 2 | SLTMYVCTP | 9 |

[1182] TABLE XXVIII-V24

HLA-B08-9mers-PSCA
Each peptide is a portion of SEQ ID NO: 8; each
start position is specified, the length of peptide
is 9 amino acids, and the end position for each
peptide is the start position plus eight.

| | | |
|---|---|---|
| Pos | 123456789 | score |

| | | |
|---|---|---|
| 3 | TPTRQISSI | 13 |
| 2 | RTPTRQISS | 8 |
| 4 | PTRQISSID | 6 |

[1183] TABLE XXVIII-V25 & 26

HLA-B08-9mers-PSCA
Each peptide is a portion of SEQ ID NO: 8; each
start position is specified, the length of peptide
is 9 amino acids, and the end position for each
peptide is the start position plus eight.

| | | |
|---|---|---|
| Pos | 123456789 | score |

| | | |
|---|---|---|
| 1 | TPTRQISSS | 7 |
| 2 | PTRQISSSD | 6 |
| 5 | QISSSDTDP | 4 |

[1184] TABLE XXVIII-V26

HLA-B08-9mers-PSCA
Each peptide is a portion of SEQ ID NO: 8; each
start position is specified, the length of peptide
is 9 amino acids, and the end position for each
peptide is the start position plus eight.

| | | |
|---|---|---|
| Pos | 123456789 | score |

| | | |
|---|---|---|
| 1 | TPTRQIGSS | 7 |
| 2 | PTRQIGSSD | 6 |
| 5 | QIGSSDTDP | 4 |
| 8 | SSDTDPPAD | 3 |

[1185] TABLE XXVIII-V27

HLA-B08-9mers-PSCA
Each peptide is a portion of SEQ ID NO: 8; each
start position is specified, the length of peptide
is 9 amino acids, and the end position for each
peptide is the start position plus eight.

| | | |
|---|---|---|
| Pos | 123456789 | score |

| | | |
|---|---|---|
| 1 | SRGQALRRA | 2 |
| 2 | RGQALRRAQ | 1 |

[1186] TABLE XXIX-V1

HLA-B1510-9mers-PSCA
Each peptide is a portion of SEQ ID NO: 2; each
start position is specified, the length of peptide
is 9 amino acids, and the end position for each
peptide is the start position plus eight.

| | | |
|---|---|---|
| Pos | 123456789 | score |

| | | |
|---|---|---|
| 13 | LALQPGTAL | 13 |
| 14 | ALQPGTALL | 13 |
| 50 | TARIRAVGL | 13 |
| 92 | CNASGAHAL | 13 |
| 97 | AHALQPAAA | 13 |
| 101 | QPAAAILAL | 13 |
| 1 | MKAVLLALL | 12 |
| 5 | LLALLMAGL | 12 |
| 36 | LQVENCTQL | 12 |
| 99 | ALQPAAAIL | 12 |
| 105 | AILALLPAL | 12 |
| 108 | ALLPALGLL | 12 |
| 115 | LLLWGPGQL | 12 |
| 7 | ALLMAGLAL | 11 |
| 28 | AQVSNEDCL | 11 |
| 51 | ARIRAVGLL | 11 |
| 60 | TVISKGCSL | 11 |
| 102 | PAAAILALL | 11 |
| 107 | LALLPALGL | 11 |
| 83 | NITCCDTDL | 10 |
| 109 | LLPALGLLL | 10 |
| 2 | KAVLLALLM | 6 |
| 53 | IRAVGLLTV | 6 |

[1187] TABLE XXIX-V4

HLA-B1510-9mers-PSCA
Each peptide is a portion of SEQ ID NO: 8; each
start position is specified, the length of peptide
is 9 amino acids, and the end position for each
peptide is the start position plus eight.

| | | |
|---|---|---|
| Pos | 123456789 | score |

| | | |
|---|---|---|
| 103 | PHPDPPMAL | 24 |
| 139 | FHGPAFSTL | 23 |
| 152 | RHLFPQEAF | 18 |
| 88 | AHPNASLTM | 17 |
| 55 | WGAPLQPTL | 15 |
| 76 | HPAQWEPVL | 15 |
| 146 | TLNPVLRHL | 15 |
| 46 | SGDPASYRL | 14 |
| 143 | AFSTLNPVL | 14 |
| 24 | AGPMPCSRL | 13 |
| 28 | PCSRLPPSL | 13 |
| 65 | VVPQASVPL | 13 |
| 160 | FPAHPIYDL | 13 |
| 2 | THRTTTWAR | 12 |
| 66 | VPQASVPLL | 12 |
| 86 | PEAHPNASL | 12 |
| 127 | PADGPSNPL | 12 |
| 32 | LPPSLRCSL | 11 |
| 40 | LHSACCSGD | 11 |
| 75 | THPAQWEPV | 11 |
| 177 | PAPSRGQAL | 11 |

[1188] TABLE XXIX-V19

HLA-B1510-9mers-PSCA
Each peptide is a portion of SEQ ID NO: 2; each
start position is specified, the length of peptide
is 9 amino acids, and the end position for each
peptide is the start position plus eight.

| | | |
|---|---|---|
| Pos | 123456789 | score |

| | | |
|---|---|---|
| 1 | GPMPCSRLL | 15 |
| 4 | PCSRLLPSL | 12 |
| 8 | LLPSLRCSL | 11 |

[1189] TABLE XXIX-V20

HLA-B1510-9mers-PSCA
Each peptide is a portion of SEQ ID NO: 2; each
start position is specified, the length of peptide
is 9 amino acids, and the end position for each
peptide is the start position plus eight.

| | | |
|---|---|---|
| Pos | 123456789 | score |

| | | |
|---|---|---|
| 3 | SGDPASSRL | 14 |
| 8 | SSRLWGAPL | 10 |

[1190] TABLE XXIX-V21

HLA-B1510-9mers-PSCA
Each peptide is a portion of SEQ ID NO: 2; each
start position is specified, the length of peptide
is 9 amino acids, and the end position for each
peptide is the start position plus eight.

| Pos | 123456789 | score |
|---|---|---|
| 9 | DPAQWEPVL | 15 |

[1191] TABLE XXIX

V21&22-HLA-
B1510-9mers-PSCA
Each peptide is a portion
of SEQ ID NO: 8; each
start position is specified,
the length of peptide is 9
amino acids, and the end
position for each peptide
is the start position plus
eight.

| | | |
|---|---|---|
| Pos | 123456789 | score |

| | | |
|---|---|---|
| 8 | DLAQWEPVL | 15 |
| 1 | ASVPLLTDL | 12 |

[1192] TABLE XXIX

V22-HLA-
B1510-9mers-PSCA
Each peptide is a portion
of SEQ ID NO: 8; each
start position is specified,
the length of peptide is 9
amino acids, and the end
position for each peptide
is the start position plus
eight.

| | | |
|---|---|---|
| Pos | 123456789 | score |

| | | |
|---|---|---|
| 8 | HLAQWEPVL | 15 |
| 1 | ASVPLLTHL | 12 |
| 7 | THLAQWEPV | 11 |

[1193] TABLE XXIX

V24-HLA-
B1510-9mers-PSCA
Each peptide is a portion
of SEQ ID NO: 8; each
start position is specified,
the length of peptide is 9
amino acids, and the end
position for each peptide
is the start position plus
eight.

| | | |
|---|---|---|
| Pos | 123456789 | score |

| | | |
|---|---|---|
| 4 | TMYVCTPVP | 5 |
| 6 | YVCTPVPHP | 4 |
| 5 | MYVCTPVPH | 3 |
| 7 | VCTPVPHPD | 3 |
| 8 | CTPVPHPDP | 3 |
| 1 | ASLTMYVCT | 2 |
| 2 | SLTMYVCTP | 2 |

[1194] TABLE XXIX

V25-HLA-
B1510-9mers-PSCA
Each peptide is a
portion of SEQ ID NO:
8; each start position is
specified, the length of
peptide is 9 amino
acids, and the end
position for each
peptide is the start
position plus eight.

| | | |
|---|---|---|
| Pos | 123456789 | score |

| | | |
|---|---|---|
| 1 | SRTPTRQIS | 3 |
| 8 | ISSIDTDPP | 3 |
| 3 | TPTRQISSI | 2 |
| 6 | RQISSIDTD | 2 |
| 9 | SSIDTDPPA | 2 |
| 4 | PTRQISSID | 1 |
| 5 | TRQISSIDT | 1 |
| 7 | QISSIDTDP | 1 |

[1195] TABLE XXIX

V25&26-
HLA-B1510-9mers-
PSCA
Each peptide is a portion
of SEQ ID NO: 8; each
start position is specified,
the length of peptide is 9
amino acids, and the end
position for each peptide
is the start position plus
eight.

| | | |
|---|---|---|
| Pos | 123456789 | score |

| | | |
|---|---|---|
| 6 | ISSSDTDPP | 3 |
| 7 | SSSDTDPPA | 3 |
| 1 | TPTRQISSS | 2 |
| 2 | PTRQISSSD | 1 |
| 3 | TRQISSSDT | 1 |
| 4 | RQISSSDTD | 1 |
| 5 | QISSSDTDP | 1 |

[1196] TABLE XXIX

V26-HLA-
B1510-9mers-PSCA
Each peptide is a portion
of SEQ ID NO: 8; each
start position is specified,
the length of peptide is 9
amino acids, and the end
position for each peptide
is the start position plus
eight.

| | | |
|---|---|---|
| Pos | 123456789 | score |

| | | |
|---|---|---|
| 7 | GSSDTDPPA | 4 |
| 6 | IGSSDTDPP | 3 |
| 8 | SSDTDPPAD | 3 |
| 9 | SDTDPPADG | 3 |
| 1 | TPTRQIGSS | 2 |
| 3 | TRQIGSSDT | 2 |
| 4 | RQIGSSDTD | 2 |
| 2 | PTRQIGSSD | 1 |

[1197] TABLE XXX-V1

HLA-B2705-9mers-PSCA
Each peptide is a portion of SEQ ID NO: 2; each
start position is specified, the length of peptide
is 9 amino acids, and the end position for each
peptide is the start position plus eight.

| | | |
|---|---|---|
| Pos | 123456789 | score |

| | | |
|---|---|---|
| 51 | ARIRAVGLL | 24 |
| 54 | RAVGLLTVI | 18 |
| 13 | LALQPGTAL | 17 |
| 53 | IRAVGLLTV | 16 |
| 56 | VGLLTVISK | 16 |
| 105 | AILALLPAL | 16 |
| 107 | LALLPALGL | 16 |
| 2 | KAVLLALLM | 15 |
| 14 | ALQPGTALL | 15 |
| 36 | LQVENCTQL | 15 |
| 108 | ALLPALGLL | 15 |
| 115 | LLLWGPGQL | 15 |
| 7 | ALLMAGLAL | 14 |
| 19 | TALLCYSCK | 14 |
| 44 | LGEQCWTAR | 14 |
| 60 | TVISKGCSL | 14 |
| 99 | ALQPAAAIL | 14 |
| 101 | QPAAAILAL | 14 |
| 1 | MKAVLLALL | 13 |
| 5 | LLALLMAGL | 13 |
| 74 | SQDYYVGKK | 13 |
| 76 | DYYVGKKNI | 13 |
| 83 | NITCCDTDL | 13 |
| 92 | CNASGAHAL | 13 |
| 98 | HALQPAAAI | 13 |
| 102 | PAAAILALL | 13 |
| 28 | AQVSNEDCL | 12 |
| 45 | GEQCWTARI | 12 |
| 50 | TARIRAVGL | 12 |
| 57 | GLLTVISKG | 12 |
| 109 | LLPALGLLL | 12 |
| 46 | EQCWTARIR | 11 |
| 70 | CVDDSQDYY | 11 |
| 73 | DSQDYYVGK | 11 |

[1198] TABLE XXX-V4

HLA-B2705-9mers-PSCA
Each peptide is a portion of SEQ ID NO: 8; each
start position is specified, the length of peptide
is 9 amino acids, and the end position for each
peptide is the start position plus eight.

| | | |
|---|---|---|
| Pos | 123456789 | score |

| | | |
|---|---|---|
| 3 | HRTTTWARR | 23 |
| 152 | RHLFPQEAF | 19 |
| 30 | SRLPPSLRC | 18 |
| 10 | RRTSRAVTP | 17 |
| 52 | YRLWGAPLQ | 16 |
| 55 | WGAPLQPTL | 16 |
| 178 | APSRGQALR | 16 |
| 179 | PRSGQALRR | 16 |
| 24 | AGPMPCSRL | 15 |
| 46 | SGDPASYRL | 15 |
| 127 | PADGPSNPL | 15 |
| 143 | AFSTLNPVL | 15 |
| 145 | STLNPVLRH | 15 |
| 160 | FPAHPIYDL | 15 |
| 173 | SVVSPAPSR | 15 |
| 180 | SRGQALRRA | 15 |
| 181 | RGQALRRAR | 15 |
| 9 | ARRTSRAVT | 14 |
| 65 | VVPQASVPL | 14 |
| 76 | HPAQWEPVL | 14 |
| 86 | PEAHPNASL | 14 |
| 105 | PDPPMALSR | 14 |
| 109 | MALSRTPTR | 14 |
| 116 | TRQIGSIDT | 14 |
| 6 | TTWARRTSR | 13 |
| 28 | PCSRLPPSL | 13 |
| 29 | CSRLPPSLR | 13 |
| 45 | CSGDPASYR | 13 |
| 66 | VPQASVPLL | 13 |
| 117 | RQIGSIDTD | 13 |
| 139 | FHGPAFSTL | 13 |
| 146 | TLNPVLRHL | 13 |
| 158 | EAFPAHPIY | 13 |
| 13 | SRAVTPTCA | 12 |
| 23 | PAGPMPCSR | 12 |
| 32 | LPPSLRCSL | 12 |
| 36 | LRCSLHSAC | 12 |
| 44 | CCSGDPASY | 12 |
| 51 | SYRLWGAPL | 12 |
| 68 | QASVPLLTH | 12 |
| 88 | AHPNASLTM | 12 |
| 89 | HPNASLTMY | 12 |
| 103 | PHPDPPMAL | 12 |
| 131 | PSNPLCCCF | 12 |
| 144 | FSTLNPVLR | 12 |
| 151 | LRHLFPQEA | 12 |
| 2 | THRTTTWAR | 11 |
| 81 | EPVLVPEAH | 11 |
| 101 | PVPHPDPPM | 11 |
| 112 | SRTPTRQIG | 11 |
| 136 | CCCFHGPAF | 11 |
| 147 | LNPVLRHLF | 11 |

[1199] TABLE XXX

V4-HLA-
B2705-9mers-PSCA
Each peptide is a portion
of SEQ ID NO:8; each
start position is specified,
the length of peptide is 9
amino acids, and the end
position for each peptide
is the start position plus
eight.

| | | |
|---|---|---|
| Pos | 123456789 | score |

| | | |
|---|---|---|
| 3 | HRTTTWARR | 23 |
| 152 | RHLFPQEAF | 19 |
| 30 | SRLPPSLRC | 18 |
| 10 | RRTSRAVTP | 17 |
| 52 | YRLWGAPLQ | 16 |
| 55 | WGAPLQPTL | 16 |
| 178 | APSRGQALR | 16 |
| 179 | PSRGQALRR | 16 |
| 24 | AGPMPCSRL | 15 |
| 46 | SGDPASYRL | 15 |
| 127 | PADGPSNPL | 15 |
| 143 | AFSTLNPVL | 15 |
| 145 | STLNPVLRH | 15 |
| 160 | FPAHPIYDL | 15 |
| 173 | SVVSPAPSR | 15 |
| 180 | SRGQALRRA | 15 |
| 181 | RGQALRRAR | 15 |
| 9 | ARRTSRAVT | 14 |
| 65 | VVPQASVPL | 14 |
| 76 | HPAQWEPVL | 14 |
| 86 | PEAHPNASL | 14 |
| 105 | PDPPMALSR | 14 |
| 109 | MALSRTPTR | 14 |
| 116 | TRQIGSIDT | 14 |
| 6 | TTWARRTSR | 13 |
| 28 | PCSRLPPSL | 13 |
| 29 | CSRLPPSLR | 13 |
| 45 | CSGDPASYR | 13 |
| 66 | VPQASVPLL | 13 |
| 117 | RQIGSIDTD | 13 |
| 139 | FHGPAFSTL | 13 |
| 146 | TLNPVLRHL | 13 |
| 158 | EAFPAHPIY | 13 |
| 13 | SRAVTPTCA | 12 |
| 23 | PAGPMPCSR | 12 |
| 32 | LPPSLRCSL | 12 |
| 36 | LRCSLHSAC | 12 |
| 44 | COSGOPASY | 12 |
| 51 | SYRLWGAPL | 12 |
| 68 | QASVPLLTH | 12 |
| 88 | AHPNASLTM | 12 |
| 89 | HPNASLTMY | 12 |
| 103 | PHPDPPMAL | 12 |
| 131 | PSNPLCCCF | 12 |
| 144 | FSTLNPVLR | 12 |
| 151 | LRHLFPQEA | 12 |
| 2 | THRTTTWAR | 11 |
| 81 | EPVLVPEAH | 11 |
| 101 | PVPHPDPPM | 11 |
| 112 | SRTPTRQIG | 11 |
| 136 | CCCFHGPAF | 11 |
| 147 | LNPVLRHLF | 11 |

[1200] TABLE XXX-V19

HLA-B2705-9mers-PSCA
Each peptide is a portion of SEQ ID NO: 8; each
start position is specified, the length of peptide
is 9 amino acids, and the end position for each
peptide is the start position plus eight.

| | | |
|---|---|---|
| Pos | 123456789 | score |

| | | |
|---|---|---|
| 6 | SRLLPSLRC | 18 |
| 1 | GPMPCSRLL | 15 |
| 4 | PCSRLLPSL | 14 |
| 5 | CSRLLPSLR | 13 |
| 8 | LLPSLRCSL | 12 |
| 9 | LPSLRCSLH | 10 |
| 7 | RLLPSLRCS | 9 |

[1201] TABLE XXX-V20

HLA-B2705-9mers-PSCA
Each peptide is a portion of SEQ ID NO: 8; each
start position is specified, the length of peptide
is 9 amino acids, and the end position for each
peptide is the start position plus eight.

| | | |
|---|---|---|
| Pos | 123456789 | score |

| | | |
|---|---|---|
| 9 | SRLWGAPLQ | 16 |
| 3 | SGDPASSRL | 15 |
| 2 | CSGDPASSR | 14 |
| 8 | SSRLWGAPL | 12 |

[1202] TABLE XXX-V21

HLA-B2705-9mers-PSCA
Each peptide is a portion of SEQ ID NO: 8; each
start position is specified, the length of peptide
is 9 amino acids, and the end position for each
peptide is the start position plus eight.

| | | |
|---|---|---|
| Pos | 123456789 | score |

| | | |
|---|---|---|
| 9 | DPAQWEPVL | 14 |
| 2 | ASVPLLTDP | 7 |

[1203] TABLE XXX-V21 & 22

HLA-B2705-9mers-PSCA
Each peptide is a portion of SEQ ID NO: 8; each
start position is specified, the length of peptide
is 9 amino acids, and the end position for each
peptide is the start position plus eight.

| | | |
|---|---|---|
| Pos | 123456789 | score |

| | | |
|---|---|---|
| 1 | ASVPLLTDL | 17 |
| 8 | DLAQWEPVL | 14 |

[1204] TABLE XXX-V22

HLA-B2705-9mers-PSCA
Each peptide is a portion of SEQ ID NO: 8; each
start position is specified, the length of peptide
is 9 amino acids, and the end position for each
peptide is the start position plus eight.

| | | |
|---|---|---|
| Pos | 123456789 | score |

| | | |
|---|---|---|
| 1 | ASVPLLTHL | 17 |
| 8 | HLAQWEPVL | 14 |

[1205] TABLE XXX-V24

HLA-B2705-9mers-PSCA
Each peptide is a portion of SEQ ID NO: 8; each
start position is specified, the length of peptide
is 9 amino acids, and the end position for each
peptide is the start position plus eight.

| | | |
|---|---|---|
| Pos | 123456789 | score |

| | | |
|---|---|---|
| 5 | MYVCTPVPH | 10 |
| 1 | ASLTMYVCT | 4 |
| 4 | TMYVCTPVP | 4 |

[1206] TABLE XXX-V25

HLA-B2705-9mers-PSCA
Each peptide is a portion of SEQ ID NO: 8; each
start position is specified, the length of peptide
is 9 amino acids, and the end position for each
peptide is the start position plus eight.

| | | |
|---|---|---|
| Pos | 123456789 | score |

| | | |
|---|---|---|
| 5 | TRQISSIDT | 13 |
| 1 | SRTPTRQIS | 11 |
| 3 | TPTRQISSI | 11 |
| 6 | RQISSIDTD | 11 |
| 2 | RTPTRQISS | 8 |

[1207] TABLE XXX-V25 & 26

HLA-B2705-9mers-PSCA
Each peptide is a portion of SEQ ID NO: 8; each
start position is specified, the length of peptide
is 9 amino acids, and the end position for each
peptide is the start position plus eight.

| | | |
|---|---|---|
| Pos | 123456789 | score |

| | | |
|---|---|---|
| 3 | TRQISSSDT | 13 |
| 4 | RQISSSDTD | 9 |
| 2 | PTRQISSSD | 6 |

[1208] TABLE XXX

V26-HLA-
B2705-9mers-PSCA
Each peptide is a portion
of SEQ ID NO: 8; each
start position is
specified, the length of
peptide is 9 amino acids,
and the end position for
each peptide is the start
position plus eight.

| | | |
|---|---|---|
| Pos | 123456789 | score |

| | | |
|---|---|---|
| 3 | TRQIGSSDT | 14 |
| 4 | RQIGSSDTD | 11 |

[1209] TABLE XXX

V27-HLA-
B2705-9mers-PSCA
Each peptide is a portion
of SEQ ID NO: 8; each
start position is specified,
the length of peptide is 9
amino acids, and the end
position for each peptide
is the start position plus
eight.

| | | |
|---|---|---|
| Pos | 123456789 | score |

| | | |
|---|---|---|
| 1 | SRGQALRRA | 15 |

[1210] TABLE XXXI

V1-HLA-
B2709-9mers-PSCA
Each peptide is a portion
of SEQ ID NO: 2; each
start position is specified,
the length of peptide is 9
amino acids, and the end
position for each peptide
is the start position plus
eight.

| | | |
|---|---|---|
| Pos | 123456789 | score |

| | | |
|---|---|---|
| 51 | ARIRAVGLL | 23 |
| 53 | IRAVGLLTV | 20 |
| 7 | ALLMAGLAL | 14 |
| 105 | AILALLPAL | 14 |
| 107 | LALLPALGL | 14 |
| 108 | ALLPALGLL | 14 |
| 2 | KAVLLALLM | 13 |
| 28 | AQVSNEDCL | 13 |
| 54 | RAVGLLTVI | 13 |
| 99 | ALQPAAAIL | 13 |
| 115 | LLLWGPGQL | 13 |
| 13 | LALQPGTAL | 12 |
| 14 | ALQPGTALL | 12 |
| 22 | LCYSCKAQV | 12 |
| 36 | LQVENCTQL | 12 |
| 45 | GEQCWTARI | 12 |
| 50 | TARIRAVGL | 12 |
| 60 | TVISKGCSL | 12 |
| 92 | CNASGAHAL | 12 |
| 30 | VSNEDCLQV | 11 |
| 76 | DYYVGKKNI | 11 |
| 83 | NITCCDTDL | 11 |
| 98 | HALQPAAAI | 11 |
| 101 | QPAAAILAL | 11 |
| 102 | PAAAILALL | 11 |
| 109 | LLPALGLLL | 11 |

[1211] TABLE XXXI

V1-HLA-
B2709-9mers-PSCA
Each peptide is a portion
of SEQ ID NO: 8; each
start position is specified,
the length of peptide is 9
amino acids, and the end
position for each peptide
is the start position plus
eight.

| | | |
|---|---|---|
| Pos | 123456789 | score |

| | | |
|---|---|---|
| 10 | RRTSRAVTP | 18 |
| 30 | SRLPPSLRC | 15 |
| 52 | YRLWGAPLQ | 14 |
| 152 | RHLFPQEAF | 14 |
| 46 | SGDPASYRL | 13 |
| 3 | HRTTTWARR | 12 |
| 24 | AGPMPCSRL | 12 |
| 55 | WGAPLQPTL | 12 |
| 57 | APLQPTLGV | 12 |
| 66 | VPQASVPLL | 12 |
| 112 | SRTPTRQIG | 12 |
| 143 | AFSTLNPVL | 12 |
| 166 | YDLSQVWSV | 12 |
| 9 | ARRTSRAVT | 11 |
| 28 | PCSRLPPSL | 11 |
| 32 | LPPSLRCSL | 11 |
| 36 | LRCSLHSAC | 11 |
| 65 | VVPQASVPL | 11 |
| 76 | HPAQWEPVL | 11 |
| 139 | FHGPAFSTL | 11 |
| 142 | PAFSTLNPV | 11 |
| 146 | TLNPVLRHL | 11 |
| 160 | FPAHPIYDL | 11 |
| 163 | HPIYDLSQV | 11 |
| 177 | PAPSRGQAL | 11 |
| 180 | SRGQALRRA | 11 |
| 13 | SRAVTPTCA | 10 |
| 51 | SYRLWGAPL | 10 |
| 86 | PEAHPNASL | 10 |
| 88 | AHPNASLTM | 10 |
| 103 | PHPDPPMAL | 10 |
| 116 | TRQIGSIDT | 10 |
| 127 | PADGPSNPL | 10 |
| 151 | LRHLFPQEA | 10 |
| 19 | TCATPAGPM | 9 |
| 58 | PLQPTLGVV | 9 |
| 63 | LGVVPQASV | 9 |
| 77 | PAQWEPVLV | 9 |
| 90 | PNASLTMYV | 9 |
| 101 | PVPHPDPPM | 9 |
| 111 | LSRTPTRQI | 9 |
| 114 | TPTRQIGSI | 9 |
| 131 | PSNPLCCCF | 9 |
| 136 | CCCFHGPAF | 9 |
| 157 | QEAFPAHPI | 9 |
| 8 | WARRTSRAV | 8 |
| 75 | THPAQWEPV | 8 |
| 94 | LTMYVCAPV | 8 |
| 147 | LNPVLRHLF | 8 |
| 167 | DLSQVWSVV | 8 |

[1212] TABLE XXXI-V20

HLA-B2709-9mers-PSCA
Each peptide is a portion of SEQ ID NO: 8; each
start position is specified, the length of peptide
is 9 amino acids, and the end position for each
peptide is the start position plus eight.

| | | |
|---|---|---|
| Pos | 123456789 | score |

| | | |
|---|---|---|
| 9 | SRLWGAPLQ | 14 |
| 3 | SGDPASSRL | 12 |
| 8 | SSRLWGAPL | 10 |

[1213] TABLE XXXI-V21

HLA-B2709-9mers-PSCA
Each peptide is a portion of SEQ ID NO: 8; each
start position is specified, the length of peptide
is 9 amino acids, and the end position for each
peptide is the start position plus eight.

| | | |
|---|---|---|
| Pos | 123456789 | score |

| | | |
|---|---|---|
| 9 | DPAQWEPVL | 11 |
| 8 | TDPAQWEPV | 8 |

[1214] TABLE XXXI-V21 & 22

HLA-B2709-9mers-PSCA
Each peptide is a portion of SEQ ID NO: 8; each
start position is specified, the length of peptide
is 9 amino acids, and the end position for each
peptide is the start position plus eight.

| | | |
|---|---|---|
| Pos | 123456789 | score |

| | | |
|---|---|---|
| 1 | ASVPLLTDL | 13 |
| 8 | DLAQWEPVL | 11 |
| 7 | TDLAQWEPV | 10 |

[1215] TABLE XXXI-V22

HLA-B2709-9mers-PSCA
Each peptide is a portion of SEQ ID NO: 8; each
start position is specified, the length of peptide
is 9 amino acids, and the end position for each
peptide is the start position plus eight.

| | | |
|---|---|---|
| Pos | 123456789 | score |

| | | |
|---|---|---|
| 1 | ASVPLLTHL | 13 |
| 8 | HLAQWEPVL | 11 |
| 7 | THLAQWEPV | 10 |
| 9 | LAQWEPVLV | 9 |

[1216] TABLE XXXI-V24

HLA-B2709-9mers-PSCA
Each peptide is a portion of SEQ ID NO: 8; each
start position is specified, the length of peptide
is 9 amino acids, and the end position for each
peptide is the start position plus eight.

| | | |
|---|---|---|
| Pos | 123456789 | score |

| | | |
|---|---|---|
| 3 | LTMYVCTPV | 8 |
| 1 | ASLTMYVCT | 4 |
| 4 | TMYVCTPVP | 3 |

[1217] TABLE XXXI-V25

HLA-B2709-9mers-PSCA
Each peptide is a portion of SEQ ID NO: 8; each
start position is specified, the length of peptide
is 9 amino acids, and the end position for each
peptide is the start position plus eight.

| | | |
|---|---|---|
| Pos | 123456789 | score |

| | | |
|---|---|---|
| 1 | SRTPTRQIS | 12 |
| 5 | TRQISSIDT | 10 |
| 3 | TPTRQISSI | 9 |
| 6 | RQISSIDTD | 6 |

[1218] TABLE XXXI-V25 & 26

HLA-B2709-9mers-PSCA
Each peptide is a portion of SEQ ID NO: 8; each
start position is specified, the length of peptide
is 9 amino acids, and the end position for each
peptide is the start position plus eight.

| | | |
|---|---|---|
| Pos | 123456789 | score |

| | | |
|---|---|---|
| 3 | TRQISSSDT | 10 |
| 4 | RQISSSDTD | 6 |

[1219] TABLE XXXI

V25&26-
HLA-B2709-9mers-
PSCA
Each peptide is a
portion of SEQ ID NO:
8; each start position is
specified, the length of
peptide is 9 amino
acids, and the end
position for each peptide
is the start position plus
eight.

| | | |
|---|---|---|
| Pos | 123456789 | score |

| | | |
|---|---|---|
| 3 | TRQISSSDT | 10 |
| 4 | RQISSSDTD | 6 |

[1220] TABLE XXXI-V26

HLA-B2709-9mers-PSCA
Each peptide is a portion of SEQ ID NO: 8; each
start position is specified, the length of peptide
is 9 amino acids, and the end position for each
peptide is the start position plus eight.

| | | |
|---|---|---|
| Pos | 123456789 | score |

| | | |
|---|---|---|
| 3 | TRQIGSSDT | 10 |
| 4 | RQIGSSDTD | 5 |
| 7 | GSSDTDPPA | 4 |

[1221] TABLE XXXI-V27

HLA-B2709-9mers-PSCA
Each peptide is a portion of SEQ ID NO: 8; each
start position is specified, the length of peptide
is 9 amino acids, and the end position for each
peptide is the start position plus eight.

| Pos | 123456789 | score |
|---|---|---|
| 1 | SRGQALRRA | 11 |

[1222] TABLE XXXII-V1

HLA-B4402-9mers-PSCA
Each peptide is a portion of SEQ ID NO: 2; each
start position is specified, the length of peptide
is 9 amino acids, and the end position for each
peptide is the start position plus eight.

| | | |
|---|---|---|
| Pos | 123456789 | score |

| | | |
|---|---|---|
| 45 | GEQCWTARI | 19 |
| 51 | ARIRAVGLL | 19 |
| 108 | ALLPALGLL | 19 |
| 14 | ALQPGTALL | 18 |
| 7 | ALLMAGLAL | 17 |
| 99 | ALQPAAAIL | 17 |
| 105 | AILALLPAL | 17 |
| 101 | QPAAAILAL | 16 |
| 28 | AQVSNEDCL | 14 |
| 92 | CNASGAHAL | 14 |
| 107 | LALLPALGL | 14 |
| 110 | LPALGLLLW | 14 |
| 13 | LALQPGTAL | 13 |
| 16 | QPGTALLCY | 13 |
| 32 | NEDCLQVEN | 13 |
| 50 | TARIRAVGL | 13 |
| 60 | TVISKGCSL | 13 |
| 102 | PAAAILALL | 13 |
| 109 | LLPALGLLL | 13 |
| 115 | LLLWGPGQL | 13 |
| 1 | MKAVLLALL | 12 |
| 36 | LQVENCTQL | 12 |
| 69 | NCVDDSQDY | 12 |
| 70 | CVDDSQDYY | 12 |
| 98 | HALQPAAAI | 12 |
| 5 | LLALLMAGL | 11 |
| 38 | VENCTQLGE | 11 |
| 41 | CTQLGEQCW | 11 |
| 54 | RAVGLLTVI | 11 |
| 83 | NITCCDTDL | 11 |
| 76 | DYYVGKKNI | 10 |
| 104 | AAILALLPA | 9 |

[1223] TABLE XXXII-V19

HLA-B4402-9mers-PSCA
Each peptide is a portion of SEQ ID NO: 8; each
start position is specified, the length of peptide
is 9 amino acids, and the end position for each
peptide is the start position plus eight.

| | | |
|---|---|---|
| Pos | 123456789 | score |

| | | |
|---|---|---|
| 1 | GPMPCSRLL | 16 |
| 4 | PCSRLLPSL | 13 |
| 8 | LLPSLRCSL | 12 |
| 7 | RLLPSLRCS | 6 |

[1224] TABLE XXXII-V20

HLA-B4402-9mers-PSCA
Each peptide is a portion of SEQ ID NO: 8; each
start position is specified, the length of peptide
is 9 amino acids, and the end position for each
peptide is the start position plus eight.

| | | |
|---|---|---|
| Pos | 123456789 | score |

| | | |
|---|---|---|
| 3 | SGDPASSRL | 15 |
| 4 | GDPASSRLW | 13 |
| 8 | SSRLWGAPL | 12 |
| 7 | ASSRLWGAP | 7 |

[1225] TABLE XXXII-V21

HLA-B4402-9mers-PSCA
Each peptide is a portion of SEQ ID NO: 8; each
start position is specified, the length of peptide
is 9 amino acids, and the end position for each
peptide is the start position plus eight.

| | | |
|---|---|---|
| Pos | 123456789 | score |

| | | |
|---|---|---|
| 5 | PLLTDPAQW | 14 |
| 9 | DPAQWEPVL | 11 |
| 2 | ASVPLLTDP | 7 |

[1226] TABLE XXXII-V21 & 22

HLA-B4402-9mers-PSCA
Each peptide is a portion of SEQ ID NO: 8; each
start position is specified, the length of peptide
is 9 amino acids, and the end position for each
peptide is the start position plus eight.

| | | |
|---|---|---|
| Pos | 123456789 | score |

| | | |
|---|---|---|
| 1 | ASVPLLTDL | 17 |
| 4 | PLLTDLAQW | 14 |
| 8 | DLAQWEPVL | 11 |

[1227] TABLE XXXII-V22

HLA-B4402-9mers-PSCA
Each peptide is a portion of SEQ ID NO: 8; each
start position is specified, the length of peptide
is 9 amino acids, and the end position for each
peptide is the start position plus eight.

| | | |
|---|---|---|
| Pos | 123456789 | score |

| | | |
|---|---|---|
| 1 | ASVPLLTHL | 17 |
| 4 | PLLTHLAQW | 14 |
| 8 | HLAQWEPVL | 11 |

[1228] TABLE XXXII-V24

HLA-B4402-9mers-PSCA
Each peptide is a portion of SEQ ID NO: 8; each
start position is specified, the length of peptide
is 9 amino acids, and the end position for each
peptide is the start position plus eight.

| | | |
|---|---|---|
| Pos | 123456789 | score |

| | | |
|---|---|---|
| 1 | ASLTMYVCT | 6 |
| 7 | VCTPVPHPD | 5 |
| 2 | SLTMYVCTP | 3 |
| 4 | TMYVCTPVP | 2 |
| 5 | MYVCTPVPH | 2 |
| 6 | YVCTPVPHP | 2 |

[1229] TABLE XXXII

V25&26-
HLA-B4402-9mers-PSCA
Each peptide is a portion
of SEQ ID NO: 8; each
start position is specified,
the length of peptide is 9
amino acids, and the end
position for each peptide
is the start position plus
eight.

| | | |
|---|---|---|
| Pos | 123456789 | score |

| | | |
|---|---|---|
| 3 | TPTRQISSI | 12 |
| 6 | RQISSIDTD | 7 |
| 1 | SRTPTRQIS | 5 |
| 9 | SSIDTDPPA | 5 |

[1230] TABLE XXXII

V25&26-
HLA-B4402-9mers-PSCA
Each peptide is a portion
of SEQ ID NO: 8; each
start position is specified,
the length of peptide is 9
amino acids, and the end
position for each peptide
is the start position plus
eight.

| | | |
|---|---|---|
| Pos | 123456789 | score |

| | | |
|---|---|---|
| 1 | TPTRQISSS | 4 |
| 4 | RQISSSDTD | 4 |
| 7 | SSSDTDPPA | 3 |
| 6 | ISSSDTDPP | 2 |
| 2 | PTRQISSSD | 1 |
| 5 | QISSSDTDP | 1 |

[1231] TABLE XXXII

V26-HLA-
B4402-9mers-PSCA
Each peptide is a portion
of SEQ ID NO: 8; each
start position is specified,
the length of peptide is 9
amino acids, and the end
position for each peptide
is the start position plus
eight.

| | | |
|---|---|---|
| Pos | 123456789 | score |

| | | |
|---|---|---|
| 8 | SSDTDPPAD | 6 |
| 4 | RQIGSSDTD | 5 |
| 1 | TPTRQIGSS | 4 |
| 9 | SDTDPPADG | 3 |
| 6 | IGSSDTDPP | 2 |

[1232] TABLE XXXII-V27

HLA-B4402-9mers-PSCA
Each peptide is a portion of SEQ ID NO: 8; each
start position is specified, the length of peptide
is 9 amino acids, and the end position for each
peptide is the start position plus eight.

| | | |
|---|---|---|
| Pos | 123456789 | score |

| | | |
|---|---|---|
| 2 | RGQALRRAQ | 4 |
| 1 | SRGQALRRA | 3 |

[1233] TABLE XXXIIII-V19

HLA-B5101-9mers-PSCA
Each peptide is a portion of SEQ ID NO: 8; each
start position is specified, the length of peptide
is 9 amino acids, and the end position for each
peptide is the start position plus eight.

| | | |
|---|---|---|
| Pos | 123456789 | score |

| | | |
|---|---|---|
| 1 | GPMPCSRLL | 17 |
| 3 | MPCSRLLPS | 13 |

[1234] TABLE XXXIIII-V1

HLA-B5101-9mers-PSCA
Each peptide is a portion of SEQ ID NO: 2; each
start position is specified, the length of peptide
is 9 amino acids, and the end position for each
peptide is the start position plus eight.

| | | |
|---|---|---|
| Pos | 123456789 | score |

| | | |
|---|---|---|
| 54 | RAVGLLTVI | 26 |
| 98 | HALQPAAAI | 23 |
| 107 | LALLPALGL | 22 |
| 13 | LALQPGTAL | 21 |
| 50 | TARIRAVGL | 19 |
| 76 | DYYVGKKNI | 19 |
| 101 | QPAAAILAL | 19 |
| 102 | PAAAILALL | 18 |
| 6 | LALLMAGLA | 16 |
| 111 | PALGLLLWG | 15 |
| 22 | LCYSCKAQV | 14 |
| 53 | IRAVGLLTV | 14 |
| 110 | LPALGLLLW | 14 |
| 16 | QPGTALLCY | 13 |
| 19 | TALLCYSCK | 13 |
| 56 | VGLLTVISK | 13 |
| 2 | KAVLLALLM | 12 |
| 10 | MAGLALQPG | 12 |
| 27 | KAQVSNEDC | 12 |
| 30 | VSNEDCLQV | 12 |
| 93 | NASGAHALQ | 12 |
| 103 | AAAILALLP | 12 |
| 104 | AAILALLPA | 12 |

[1235] TABLE XXXIIII-V19

HLA-B5101-9mers-PSCA
Each peptide is a portion of SEQ ID NO: 8; each
start position is specified, the length of peptide
is 9 amino acids, and the end position for each
peptide is the start position plus eight.

| | | |
|---|---|---|
| Pos | 123456789 | score |

| | | |
|---|---|---|
| 9 | LPSLRCSLH | 12 |
| 8 | LLPSLRCSL | 9 |

[1236] TABLE XXXIIII-V20

HLA-B5101-9mers-PSCA
Each peptide is a portion of SEQ ID NO: 8; each
start position is specified, the length of peptide
is 9 amino acids, and the end position for each
peptide is the start position plus eight.

| | | |
|---|---|---|
| Pos | 123456789 | score |

| | | |
|---|---|---|
| 5 | DPASSRLWG | 16 |
| 3 | SGDPASSRL | 13 |
| 6 | PASSRLWGA | 11 |

[1237] TABLE XXXIIII-V21

HLA-B5101-9mers-PSCA
Each peptide is a portion of SEQ ID NO: 8; each
start position is specified, the length of peptide
is 9 amino acids, and the end position for each
peptide is the start position plus eight.

| | | |
|---|---|---|
| Pos | 123456789 | score |

| | | |
|---|---|---|
| 9 | DPAQWEPVL | 23 |
| 1 | QASVPLLTD | 14 |
| 4 | VPLLTDPAQ | 14 |
| 8 | TDPAQWEPV | 11 |

[1238] TABLE XXXIIII-V21 & 22

HLA-B5101-9mers-PSCA
Each peptide is a portion of SEQ ID NO: 8; each
start position is specified, the length of peptide
is 9 amino acids, and the end position for each
peptide is the start position plus eight.

| | | |
|---|---|---|
| Pos | 123456789 | score |

| | | |
|---|---|---|
| 3 | VPLLTDLAQ | 15 |
| 8 | DLAQWEPVL | 13 |
| 7 | TDLAQWEPV | 12 |
| 1 | ASVPLLTDL | 8 |

[1239] TABLE XXXIIII-V22

HLA-B5101-9mers-PSCA
Each peptide is a portion of SEQ ID NO: 8; each
start position is specified, the length of peptide
is 9 amino acids, and the end position for each
peptide is the start position plus eight.

| | | |
|---|---|---|
| Pos | 123456789 | score |

| | | |
|---|---|---|
| 9 | LAQWEPVLV | 22 |
| 3 | VPLLTHLAQ | 15 |
| 7 | THLAQWEPV | 12 |

[1240] TABLE XXXIIII-V24

HLA-B5101-9mers-PSCA
Each peptide is a portion of SEQ ID NO: 8; each
start position is specified, the length of peptide
is 9 amino acids, and the end position for each
peptide is the start position plus eight.

| | | |
|---|---|---|
| Pos | 123456789 | score |

| | | |
|---|---|---|
| 3 | LTMYVCTPV | 13 |
| 4 | TMYVCTPVP | 8 |
| 6 | YVCTPVPHP | 6 |

[1241] TABLE XXXIIII-V25

HLA-B5101-9mers-PSCA
Each peptide is a portion of SEQ ID NO: 8; each
start position is specified, the length of peptide
is 9 amino acids, and the end position for each
peptide is the start position plus eight.

| Pos | 123456789 | score |
|---|---|---|
| 3 | TPTRQISSI | 22 |

[1242] TABLE XXXIIII-V25 & 26

HLA-B5101-9mers-PSCA
Each peptide is a portion of SEQ ID NO: 8; each
start position is specified, the length of peptide
is 9 amino acids, and the end position for each
peptide is the start position plus eight.

| Pos | 123456789 | score |
|---|---|---|
| 1 | TPTRQISSS | 12 |

[1243] TABLE XXXIIII-V26

HLA-B5101-9mers-PSCA
Each peptide is a portion of SEQ ID NO: 8; each
start position is specified, the length of peptide
is 9 amino acids, and the end position for each
peptide is the start position plus eight.

| | | |
|---|---|---|
| Pos | 123456789 | score |

| | | |
|---|---|---|
| 1 | TPTRQIGSS | 12 |
| 6 | IGSSDTDPP | 8 |

[1244] TABLE XXXIIII-V27

HLA-B5101-9mers-PSCA
Each peptide is a portion of SEQ ID NO: 8; each
start position is specified, the length of peptide
is 9 amino acids, and the end position for each
peptide is the start position plus eight.

| | | |
|---|---|---|
| Pos | 123456789 | score |

| | | |
|---|---|---|
| 2 | RGQALRRAQ | 8 |
| 1 | SRGQALRRA | 3 |

[1245] TABLE XXXIV-V1

HLA-A1-10mers-PSCA
Each peptide is a portion of SEQ ID NO: 2; each
start position is specified, the length of peptide
is 10 amino acids, and the end position for each
peptide is the start position plus nine.

| | | |
|---|---|---|
| Pos | 1234567890 | score |

| | | |
|---|---|---|
| 15 | LQPGTALLCY | 22 |
| 37 | QVENCTQLGE | 16 |
| 88 | DTDLCNASGA | 16 |
| 68 | LNCVDDSQDY | 15 |
| 69 | NCVDDSQDYY | 15 |
| 74 | SQDYYVGKKN | 15 |
| 108 | ALLPALGLLL | 15 |
| 14 | ALQPGTALLC | 14 |
| 31 | SNEDCLQVEN | 12 |
| 71 | VDDSQDYYVG | 12 |
| 84 | ITCCDTDLCN | 12 |
| 99 | ALQPAAAILA | 12 |
| 32 | NEDCLQVENC | 11 |
| 44 | LGEQCWTARI | 10 |
| 51 | ARIRAVGLLT | 10 |
| 70 | CVDDSQDYYV | 10 |
| 86 | CCDTDLCNAS | 10 |

[1246] TABLE XXXIV

V4-HLA-A1-
10mers-PSCA
Each peptide is a portion of
SEQ ID NO: 8; each start
position is specified, the
length of peptide is 10
amino acids, and the end
position for each peptide is
the start position plus nine.

| | | |
|---|---|---|
| Pos | 1234567890 | score |

| | | |
|---|---|---|
| 104 | HPDPPMALSR | 20 |
| 123 | DTDPPADGPS | 20 |
| 46 | SGDPASYRLW | 18 |
| 88 | AHPNASLTMY | 17 |
| 43 | ACCSGDPASY | 16 |
| 79 | QWEPVLVPEA | 15 |
| 157 | QEAFPAHPIY | 15 |
| 127 | PADGPSNPLC | 14 |
| 85 | VPEAHPNASL | 12 |
| 121 | SIDTDPPADG | 12 |
| 144 | FSTLNPVLRH | 12 |
| 25 | GPMPCSRLPP | 11 |
| 128 | ADGPSNPLCC | 11 |
| 165 | IYDLSQVWSV | 11 |
| 29 | CSRLPPSLRC | 10 |
| 74 | LTHPAQWEPV | 10 |
| 87 | EAHPNASLTM | 10 |
| 112 | SRTPTRQIGS | 10 |
| 115 | PTRQIGSIDT | 10 |
| 156 | PQEAFPAHPI | 10 |
| 161 | PAHPIYDLSQ | 10 |
| 66 | VPQASVPLLT | 9 |
| 69 | ASVPLLTHPA | 9 |

[1247] TABLE XXXIV

V19-HLA-A1-
10mers-PSCA
Each peptide is a portion
of SEQ ID NO: 8; each
start position is specified,
the length of peptide is 10
amino acids, and the end
position for each peptide is
the start position plus nine.

| | | |
|---|---|---|
| Pos | 1234567890 | score |

| | | |
|---|---|---|
| 2 | GPMPCSRLLP | 13 |
| 6 | CSRLLPSLRC | 10 |
| 3 | PMPCSRLLPS | 6 |
| 8 | RLLPSLRCSL | 6 |
| 10 | LPSLRCSLHS | 6 |

[1248] TABLE XXXIV

V20-HLA-A1-
10mers-PSCA
Each peptide is a portion of
SEQ ID NO: 8; each start
position is specified, the
length of peptide is 10
amino acids, and the end
position for each peptide is
the start position plus nine.

| | | |
|---|---|---|
| Pos | 1234567890 | score |

| | | |
|---|---|---|
| 4 | SGDPASSRLW | 18 |
| 9 | SSRLWGAPLQ | 8 |
| 10 | SRLWGAPLQP | 8 |

[1249] TABLE XXXIV

V21-HLA-A1-
10mers-PSCA
Each peptide is a portion
of SEQ ID NO: 8; each
start position is specified,
the length of peptide is 10
amino acids, and the end
position for each peptide is
the start position plus nine.

| Pos | 1234567890 | score |
|---|---|---|
| 8 | LTDPAQWEPV | 20 |
| 3 | ASVPLLTDPA | 9 |

[1250] TABLE XXXIV

V21&22-HLA-
A1-10mers-PSCA
Each peptide is a portion
of SEQ ID NO: 8; each
start position is specified,
the length of peptide is 10
amino acids, and the end
position for each peptide is
the start position plus nine.

| | | |
|---|---|---|
| Pos | 1234567890 | score |

| | | |
|---|---|---|
| 7 | LTDLAQWEPV | 16 |
| 2 | ASVPLLTDLA | 11 |
| 3 | SVPLLTDLAQ | 8 |

[1251] TABLE XXXIV

| | |
|---|---|
| V22-HLA-A1- | ; |
| 10mers-PSCA | |
| Each peptide is a portion | |
| of SEQ ID NO: 8; each | |
| start position is specified, | |
| the length of peptide is 10 | |
| amino acids, and the end | |
| position for each peptide is | |
| the start position plus nine. | |

| | | |
|---|---|---|
| Pos | 1234567890 | score |

| | | |
|---|---|---|
| 2 | ASVPLLTHLA | 11 |
| 3 | SVPLLTHLAQ | 8 |
| 10 | LAQWEPVLVP | 8 |
| 7 | LIHLAQWEPV | 6 |

[1252] TABLE XXXIV

V24-HLA-A1-
10mers-PSCA
Each peptide is a portion
of SEQ ID NO: 8; each
start position is specified,
the length of peptide is 10
amino acids, and the end
position for each peptide is
the start position plus nine.

| | | |
|---|---|---|
| Pos | 1234567890 | score |

| | | |
|---|---|---|
| 4 | LTMYVCTPVP | 7 |
| 2 | ASLTMYVCTP | 6 |
| 9 | CIPVPHEDPP | 6 |
| 8 | VCTPVPHPDP | 5 |
| 10 | TPVPHPDPPM | 4 |
| 3 | SLTMYVCTPV | 3 |

[1253] TABLE XXXIV

V25-HLA-
A1-10mers-PSCA
Each peptide is a portion
of SEQ ID NO: 8; each
start position is specified,
the length of peptide is 10
amino acids, and the end
position for each peptide
is the start position plus
nine.

| | | |
|---|---|---|
| Pos | 1234567890 | score |

| | | |
|---|---|---|
| 2 | SRTPTRQISS | 10 |
| 5 | PIRQISSIDT | 10 |
| 3 | RIPTRQISSI | 6 |
| 10 | SSIDTDPPAD | 6 |
| 1 | LSRTPTRQIS | 5 |
| 9 | ISSIDTDPPA | 4 |

[1254] TABLE XXXIV

V25&26-
HLA-A1-10mers-PSCA
Each peptide is a portion
of SEQ ID NO: 8; each
start position is specified,
the length of peptide is 10
amino acids, and the end
position for each peptide is
the start position plus nine.

| | | |
|---|---|---|
| Pos | 1234567890 | score |

| | | |
|---|---|---|
| 1 | RTPTRQISSS | 6 |
| 3 | PTRQISSSDT | 6 |
| 8 | SSSDTDPPAD | 6 |
| 7 | ISSSDTDPPA | 4 |

[1255] TABLE XXXIV

V26-HLA-A1-
10mers-PSCA
Each peptide is a portion
of SEQ ID NO: 8; each
start position is specified,
the length of peptide is 10
amino acids, and the end
position for each peptide is
the start position plus nine.

| | | |
|---|---|---|
| Pos | 1234567890 | score |

| | | |
|---|---|---|
| 9 | SSDTDPPADG | 16 |

[1256] TABLE XXXIV

V27-H LA-A1-
10mers-PSCA
Each peptide is a portion of
SEQ ID NO: 8; each start
position is specified, the
length of peptide is 10
amino acids, and the end
position for each peptide is
the start position plus nine.

| | | |
|---|---|---|
| Pos | 1234567890 | score |

| | | |
|---|---|---|
| 1 | PSRGQALRRA | 5 |
| 2 | SRGQALRRAQ | 3 |

[1257] TABLE XXXV

V1-HLA-
A0201-10mers-PSCA
Each peptide is a portion of
SEQ ID NO: 2; each start
position is specified, the
length of peptide is 10
amino acids, and the end
position for each peptide is
the start position plus nine.

| | | |
|---|---|---|
| Pos | 1234567890 | score |

| | | |
|---|---|---|
| 108 | ALLPALGLLL | 27 |
| 4 | VLLALLMAGL | 26 |
| 106 | ILALLPALGL | 26 |
| 52 | RIRAVGLLTV | 25 |
| 12 | GLALQPGTAL | 24 |
| 104 | AAILALLPAL | 24 |
| 21 | LLCYSCKAQV | 23 |
| 114 | GLLLWGPGQL | 23 |
| 107 | LALLPALGLL | 22 |
| 6 | LALLMAGLAL | 20 |
| 7 | ALLMAGLALQ | 20 |
| 13 | LALQPGTALL | 20 |
| 35 | CLQVENCTQL | 20 |
| 49 | WTARIRAVGL | 19 |
| 5 | LLALLMAGLA | 18 |
| 9 | LMAGLALQPG | 18 |
| 50 | TARIRAVGLL | 18 |
| 59 | LTVISKGCSL | 18 |
| 62 | ISKGCSLNCV | 18 |
| 98 | HALQPAAAIL | 18 |
| 99 | ALQPAAAILA | 18 |
| 100 | LQPAAAILAL | 18 |
| 101 | QPAAAILALL | 18 |
| 103 | AAAILALLPA | 17 |
| 109 | LLPALGLLLW | 17 |
| 47 | QCWTARIRAV | 16 |
| 53 | IRAVGLLTVI | 16 |
| 70 | CVDDSQDYYV | 16 |
| 14 | ALQPGIALLC | 15 |
| 27 | KAQVSNEDCL | 15 |
| 29 | QVSNESCLQV | 15 |
| 90 | DLCNASGAHA | 15 |
| 91 | LCNASGAHAL | 15 |
| 97 | AHALQPAAAI | 15 |
| 2 | KAVLLALLMA | 14 |
| 8 | LLMAGLALQP | 14 |
| 20 | ALLCYSCKAQ | 14 |
| 105 | AILALLPALG | 14 |
| 3 | AVLLALLMAG | 13 |
| 43 | QLGEQCWTAR | 13 |
| 57 | GLLTVISKGC | 13 |
| 67 | SLNCVDDSQD | 13 |
| 82 | KNITCCDTDL | 13 |

[1258] TABLE XXXV

V4-HLA-
A0201-10mers-PSCA
Each peptide is a portion of
SEQ ID NO: 8; each start
position is specified, the
length of peptide is 10
amino acids, and the end
position for each peptide is
the start position plus nine.

| | | |
|---|---|---|
| Pos | 1234567890 | score |

| | | |
|---|---|---|
| 31 | RLPPSLRCSL | 24 |
| 62 | TLGVVPQASV | 24 |
| 93 | SLTMYVCAPV | 23 |
| 145 | STLNPVLRHL | 22 |
| 53 | RLWGAPLQPT | 21 |
| 65 | VVPQASVPLL | 20 |
| 110 | ALSRTPTRQI | 20 |
| 64 | GVVPQASVPL | 19 |
| 57 | APLQPTLGVV | 18 |
| 74 | LTHPAQWEPV | 18 |
| 83 | VLVPEAHPNA | 18 |
| 113 | RTPTRQIGSI | 18 |
| 165 | IYDLSQVWSV | 18 |
| 56 | GAPLQPTLGV | 17 |
| 141 | GPAFSTLNPV | 17 |
| 150 | VLRHLFPQEA | 17 |
| 153 | HLFPQEAFPA | 17 |
| 159 | AFPAHPIYDL | 17 |
| 176 | SPAPSRGQAL | 17 |
| 162 | AHPIYDLSQV | 16 |
| 50 | ASYRLWGAPL | 15 |
| 54 | LWGAPLQPTL | 15 |
| 76 | HPAQWEPVLV | 14 |
| 85 | VPEAHPNASL | 14 |
| 102 | VPHPDEPMAL | 14 |
| 138 | CFHGPAFSTL | 14 |
| 146 | TLNPVLRHLF | 14 |
| 166 | YDLSQMWSVV | 14 |
| 7 | TWARRTSRAV | 13 |
| 23 | PAGPMPCSRL | 13 |
| 27 | MPCSRLPPSL | 13 |
| 35 | SLRCSLHSAC | 13 |
| 39 | SLHSACCSGD | 13 |
| 73 | LLTHPAQWEP | 13 |
| 142 | PAFSTLNPVL | 13 |
| 45 | CSGDPASYRL | 12 |
| 79 | QWEPVLVPEA | 12 |
| 121 | SIDTDPPADG | 12 |
| 15 | AVTPTCATPA | 11 |
| 58 | PLQPTLGVVP | 11 |
| 75 | THPAQWEPVL | 11 |
| 78 | AQWEPVLVPE | 11 |
| 89 | HPNASLTMYV | 11 |
| 95 | TMYVCAPVPH | 11 |
| 126 | PPADGPSNPL | 11 |
| 134 | PLCCCFHGPA | 11 |
| 167 | DLSQVWSVVS | 11 |

[1259] TABLE XXXV

V19-HLA-
A0201-10mers-PSCA
Each peptide is a portion
of SEQ ID NO: 8; each
start position is specified,
the length of peptide is 10
amino acids, and the end
position for each peptide is
the start position plus nine.

| | | |
|---|---|---|
| Pos | 1234567890 | score |

| | | |
|---|---|---|
| 8 | RLLPSLRCSL | 26 |
| 4 | MPCSRLLPSL | 17 |
| 1 | AGPMPCSRLL | 12 |
| 9 | LLPSLRCSLH | 12 |

[1260] TABLE XXXV

V20-HLA-
A0201-10mers-PSCA
Each peptide is a portion of
SEQ ID NO: 8; each start
position is specified, the
length of peptide is 10
amino acids, and the end
position for each peptide is
the start position plus nine.

| | | |
|---|---|---|
| Pos | 1234567890 | score |

| | | |
|---|---|---|
| 8 | ASSRLWGAPL | 14 |
| 3 | CSGDPASSRL | 11 |
| 6 | DPASSRLWGA | 10 |
| 1 | ACCSGDPASS | 6 |

[1261] TABLE XXXV

V21-HLA
A0201-10mers-PSCA
Each peptide is a portion of
SEQ ID NO: 8; each start
position is specified, the
length of peptide is 10
amino acids, and the end
position for each peptide is
the start position plus nine.

| | | |
|---|---|---|
| Pos | 1234567890 | score |

| | | |
|---|---|---|
| 8 | LTDPAQWEPV | 18 |
| 7 | LLTDPAQWEP | 14 |
| 10 | DPAQWEPVLV | 13 |
| 9 | TDPAQWEPVL | 11 |
| 6 | PLLTDPAQWE | 9 |
| 2 | QASVPLLTDP | 8 |
| 3 | ASVPLLTDPA | 8 |
| 4 | SVPLLTDPAQ | 8 |

[1262] TABLE XXXV

V21&22-HLA-
A0201-10mers-PSCA
Each peptide is a portion
of SEQ ID NO: 8; each
start position is specified,
the length of peptide is 10
amino acids, and the end
position for each peptide is
the start position plus nine.

| | | |
|---|---|---|
| Pos | 1234567890 | score |

| | | |
|---|---|---|
| 9 | DLAQWEPVLV | 23 |
| 1 | QASVPLLTDL | 18 |
| 7 | LTDLAQWEPV | 16 |
| 6 | LLTDLAQWEP | 14 |
| 8 | TDLAQWEPVL | 13 |
| 9 | HLAQWEPVLV | 24 |
| 1 | QASVPLLTHL | 18 |
| 7 | LTHLAQWEPV | 16 |
| 6 | LLTHLAQWEP | 13 |
| 8 | THLAQWEPVL | 13 |
| 10 | LAQWEPVLVP | 11 |

[1263] TABLE XXXV

V24-HLA-
A0201-10mers-PSCA
Each peptide is a portion
of SEQ ID NO: 8; each
start position is specified,
the length of peptide is 10
amino acids, and the end
position for each peptide is
the start position plus nine.

| | | |
|---|---|---|
| Pos | 1234567890 | score |

| | | |
|---|---|---|
| 3 | SLTMYVCTPV | 21 |
| 5 | TMYVCIPVPH | 11 |
| 1 | NASLTMYVCT | 10 |
| 2 | ASLTMYVCTP | 10 |

[1264] TABLE XXXV

V25-HLA-
Each peptide is a portion
of SEQ ID NO: 8; each
start position is specified,
the length of peptide is
10 amino acids, and the
end position for each
peptide is the start
position plus nine.

| | | |
|---|---|---|
| Pos | 1234567890 | score |

| | | |
|---|---|---|
| 3 | RTPTRQISSI | 18 |
| 8 | QISSIDTDPP | 8 |

[1265] TABLE XXXV

V25&26-HLA-
A0201-10mers-PSCA
Each peptide is a portion
of SEQ ID NO: 8; each
start position is specified,
the lenght of peptide is 10
amino acids, and the end
position for each peptide is
the start position plus nine.

| | | |
|---|---|---|
| Pos | 1234567890 | score |

| | | |
|---|---|---|
| 1 | RPTTRQISSS | 10 |
| 6 | QISSSDTDPP | 8 |
| 7 | ISSSDTDPPA | 7 |
| 3 | PTRQISSSDT | 5 |
| 8 | SSSDTDPPAD | 5 |

[1266] TABLE XXXV

V26-HLA-
A0201-10mers-PSCA
Each peptide is a portion
of SEQ ID NO: 8; each
start position is specified,
the length of peptide is 10
amino acids, and the end
position for each peptide is
the start position plus nine.

| | | |
|---|---|---|
| Pos | 1234567890 | score |

| | | |
|---|---|---|
| 1 | RTPTRQIGSS | 10 |
| 6 | QIGSSDTDPP | 8 |
| 7 | IGSSDTDPPA | 7 |
| 3 | PTRQIGSSDT | 5 |
| 5 | RQIGSSDTDP | 4 |
| 8 | GSSDTDPPAD | 4 |
| 9 | SSDTDPPADG | 4 |

[1267] TABLE XXXV

V27-HLA-
A0201-10mers-PSCA
Each peptide is a portion of
SEQ ID NO: 8; each start
position is specified, the
length of peptide is 10
amino acids, and the end
position for each peptide is
the start position plus nine.

| | | |
|---|---|---|
| Pos | 1234567890 | score |

| | | |
|---|---|---|
| 1 | PSRGQALRRA | 7 |
| 2 | SRGQALRRAQ | 3 |

[1268] TABLE XXXVI

V1-HLA-
A0203-10mers-PSCA
Each peptide is a portion
of SEQ ID NO: 2; each
start position is specified,
the length of peptide is 10
amino acids, and the end
position for each peptide is
the start position plus nine.

| | | |
|---|---|---|
| Pos | 1234567890 | score |

| | | |
|---|---|---|
| 96 | GAHALQPAAA | 27 |
| 95 | SGAHALQPAA | 19 |
| 90 | DLCNASGAHA | 18 |
| 97 | AHALQPAAAI | 17 |

[1269] TABLE XXXVI

V4-HLA-
A0203-10mers-PSCA
Each peptide is a portion of
SEQ ID NO: 8; each start
position is specified, the
length of peptide is 10
amino acids, and the end
position for each peptide is
the start position plus nine.

| | | |
|---|---|---|
| Pos | 1234567890 | score |

| | | |
|---|---|---|
| 6 | TTWARRTSRA | 10 |
| 12 | TSRAVTPTCA | 10 |
| 15 | AVTPTCATPA | 10 |
| 34 | PSLRCSLHSA | 10 |
| 41 | HSACCSGDPA | 10 |
| 48 | DPASYRLWGA | 10 |
| 60 | QPTLGVVPQA | 10 |
| 69 | ASVPLLTHPA | 10 |
| 79 | QWEPVLYPEA | 10 |
| 83 | VLVPEAHPNA | 10 |
| 91 | NASLTMYVCA | 10 |
| 101 | PVPHPDPPMA | 10 |
| 119 | IGSIDTDPPA | 10 |
| 134 | PLCCCFHGPA | 10 |
| 150 | VLRHLFPQEA | 10 |
| 153 | HLFPQEAFPA | 10 |
| 169 | SQVWSVVSPA | 10 |
| 175 | VSPAPSRGQA | 10 |
| 179 | PSRGQALRRA | 10 |
| 1 | MTHRTTTWAR | 9 |
| 7 | TWARRTSRAV | 9 |
| 13 | SRAVTPICAT | 9 |
| 16 | VIPTCAIPAG | 9 |
| 35 | SLRCSLHSAC | 9 |
| 42 | SACCSGDPAS | 9 |
| 49 | PASYRLWGAP | 9 |
| 61 | PTLGVVPQAS | 9 |
| 70 | SVPLLTHPAQ | 9 |
| 80 | WEPVLVEEAH | 9 |
| 84 | LVPEAHRNAS | 9 |
| 92 | ASLTMYMCAP | 9 |
| 102 | VEHPDPEMAL | 9 |
| 120 | GSIDTDPPAD | 9 |
| 135 | LCCCFHGPAF | 9 |
| 151 | LRHLFPQEAF | 9 |
| 154 | LFPQEAFPAH | 9 |
| 170 | QVWSWSPAPL | 9 |
| 176 | SPAPSRGQAL | 9 |
| 180 | SRGQALPRAR | 9 |
| 2 | THRTTTWARR | 8 |
| 8 | WARRTSRAVT | 8 |
| 14 | RAVTPTCATP | 8 |
| 17 | TETCATPAGP | 8 |
| 36 | LRCSLHSACC | 8 |
| 43 | ACCSGDPASY | 8 |
| 50 | ASYRLWGAPL | 8 |
| 62 | TLGVVPQASV | 8 |
| 71 | VPLLTHPAQW | 8 |
| 81 | EPVLVPEAHP | 8 |
| 85 | VPEAHPNASL | 8 |
| 93 | SLTMYVCAPV | 8 |
| 103 | PHPDPPMALS | 8 |
| 121 | SIDTDPPADG | 8 |
| 136 | CCCFHGEAFS | 8 |
| 152 | RHLFPQEAFP | 8 |
| 155 | FPQEAFPAHP | 8 |
| 171 | VWSVVSPAPS | 8 |
| 177 | PAPSRGQALR | 8 |

[1270] TABLE XXXVI

V19-HLA-
A0203-10mers-PSCA

| | | |
|---|---|---|
| Pos | 1234567890 | score |

NoResultsFound.

[1271] TABLE XXXVI

V20-HLA-
A0203-10mers-PSCA
Each peptide is a portion of
SEQ ID NO: 8; each start
posidon is specified, the
length of peptide is 10
amino acids, and the end
posifion for each peptide is
the start position plus nine.

| | | |
|---|---|---|
| Pos | 1234567890 | score |

| | | |
|---|---|---|
| 6 | DPASSRLWGA | 10 |
| 7 | PASSRLWGAP | 9 |
| 1 | ACCSGDPASS | 8 |
| 8 | ASSRLWGAPL | 8 |

[1272] TABLE XSXVI

V21-HLA-
A0203-10mers-PSCA
Each peptide is a portion
of SEQ ID NO: 8; each
start position is specified,
the length of peptide is 10
amino acids, and the end
position for each peptide is
the start position plus nine.

| Pos | 1234567890 | score |
|---|---|---|
| 3 | ASVPLLTDPA | 10 |
| 4 | SVPLLTDPAQ | 9 |
| 5 | VELLTDPAQW | 8 |

[1273] TABLE XXXVI

V21&22-
HLA-A0203-10mers-
PSCA
Each peptide is a portion
of SEQ ID NO: 8; each
start position is specified,
the length of peptide is 10
amino acids, and the end
position for each peptide
is the start position plus
nine.

| | | |
|---|---|---|
| Pos | 1234567890 | score |

| | | |
|---|---|---|
| 2 | ASVPLLTDLA | 10 |
| 3 | SVPLLTDLAQ | 9 |
| 4 | VPLLTDLAQW | 8 |

[1274] TABLE XXXVI

V22-HLA-
A0203-10mers-PSCA
Each peptide is a portion
of SEQ ID NO: 8; each
start position is specified,
the length of peptide is 10
amino acids, and the end
position for each peptide
is the start position plus
nine.

| | | |
|---|---|---|
| Pos | 1234567890 | score |

| | | |
|---|---|---|
| 2 | ASVPLLTHLA | 10 |
| 3 | SVPLLTHLAQ | 9 |
| 4 | VPLLTHLAQW | 8 |

[1275] TABLE XXXVI

V24-HLA-
A0203-10mers-PSCA

| | | |
|---|---|---|
| Pos | 1234567890 | score |

NoResultsFound.

[1276] TABLE XXXVI

V25-HLA-
A0203-10mers-PSCA
Each peptide is a portion
of SEQ ID NO: 8; each
start position is specified,
the length of pepUde is 10
amino acids, and the end
position for each peptide
is the start position plus
nine.

| | | |
|---|---|---|
| Pos | 1234567890 | score |

| | | |
|---|---|---|
| 9 | ISSIDTDPPA | 10 |
| 10 | SSIDTDPPAD | 9 |

[1277] TABLE XXXVI

V25&28-
HLA-A0203-10mers-PSCA
Each peptide is a portion
of SEQ ID NO: 8; each
start position is specified,
the length of peptide is 10
amino acids, and the end
position for each peptide is
the start position plus nine.

| | | |
|---|---|---|
| Pos | 1234567890 | score |

| | | |
|---|---|---|
| 7 | ISSSDTDPPA | 10 |
| 8 | SSSDTDPPAD | 9 |

[1278] TABLE XXXVI

V26-HLA-
A0203-10mers-PSCA
Each peptide is a portion
of SEQ ID NO: 8; each
start position is specified,
the length of peptide is 10
amino acids, and the end
position for each peptide is
the start position plus nine.

| | | |
|---|---|---|
| Pos | 1234567890 | score |

| | | |
|---|---|---|
| 7 | IGSSDTDPPA | 10 |
| 8 | GSSDTDRPAD | 9 |
| 9 | SSDTDPPADG | 8 |

[1279] TABLE XXXVI

V27-HLA-
A0203-10mers-PSCA
Each peptide is a portion of
SEQ ID NO: 8; each start
position is specified, the
length of peptide is 10
amino acids, and the end
position for each peptide is
the start position plus nine.

| | | |
|---|---|---|
| Pos | 1234567890 | score |

| | | |
|---|---|---|
| 1 | PSRGQALRRA | 10 |
| 2 | SRGQALRRAQ | 9 |

[1280] TABLE XXXVII

V1-HLA-A3-10mers-PSCA
Each peptide is a portion of SEQ ID NO: 2;
each start position is specified, the
length of peptide is 10 amino acids, and
the end position for each peptide is the
start position plus nine.

| | | |
|---|---|---|
| Pos | 1234567890 | score |

| | | |
|---|---|---|
| 55 | AVGLLTVISK | 26 |
| 52 | RIRAVGLLTV | 24 |
| 108 | ALLPALGLLL | 24 |
| 14 | ALQPGTALLC | 22 |
| 8 | LLMAGLALQP | 21 |
| 106 | ILALLPALGL | 20 |
| 29 | QVSNEDCLQV | 19 |
| 43 | QLGEQCWTAR | 19 |
| 99 | ALQPAAAILA | 19 |
| 105 | AILALLPALG | 19 |
| 3 | AVLLALLMAG | 18 |
| 7 | ALLMAGLALQ | 18 |
| 114 | GLLLWGPGQL | 18 |
| 4 | VLLALLMAGL | 17 |
| 12 | GLALQPGTAL | 17 |
| 67 | SLNCVDDSQD | 17 |
| 90 | DLCNASGAHA | 17 |
| 5 | LLALLMAGLA | 16 |
| 20 | ALLCYSCKAQ | 16 |
| 21 | LLCYSCKAQV | 16 |
| 37 | QVENCTQLGE | 16 |
| 60 | TVISKGCSLN | 16 |
| 18 | GTALLCYSCK | 15 |
| 51 | ARIRAVGLLT | 15 |
| 109 | LLPALGLLLW | 15 |
| 112 | ALGLLLWGPG | 15 |
| 35 | CLQVENCTQL | 14 |
| 72 | DDSQDYYVGK | 14 |
| 11 | AGLALQPGTA | 13 |
| 57 | GLLTVISKGC | 12 |
| 73 | DSQDYYVGKK | 12 |
| 97 | AHALQPAAAI | 12 |

[1281] TABLE XXXVII

V4-HLA-A3-10mers-PSCA
Each peptide is a portion of SEQ ID NO: 8;
each start position is specified, the
length of peptide is 10 amino acids, and
the end position for each peptide is the
start position plus nine.

| | | |
|---|---|---|
| Pos | 1234567890 | score |

| | | |
|---|---|---|
| 58 | PLQPTLGVVP | 24 |
| 15 | AVTPTCATPA | 20 |
| 31 | RLPPSLRCSL | 20 |
| 110 | ALSRTPTRQI | 19 |
| 35 | SLRCSLHSAC | 18 |
| 146 | TLNPVLRHLF | 18 |
| 149 | PVLRHLFPQE | 18 |
| 164 | PIYDLSQVWS | 18 |
| 167 | DLSQVWSVVS | 18 |
| 9 | ARRTSRAVTP | 17 |
| 64 | GVVPQASVPL | 17 |
| 50 | ASYRLWGAPL | 16 |
| 53 | RLWGAPLQPT | 16 |
| 72 | PLLTHPAQWE | 16 |
| 153 | HLFPQEAFPA | 16 |
| 178 | APSRGQALRR | 16 |
| 43 | ACCSGDPASY | 15 |
| 62 | TLGVVPQASV | 15 |
| 82 | PVLPEAHPN | 15 |
| 104 | HPDPPMALSR | 15 |
| 173 | SVVSPAPSRG | 15 |
| 8 | WARRTSRAVT | 14 |
| 39 | SLHSACCSGD | 14 |
| 93 | SLTMYVCAPV | 14 |
| 150 | VLRHLFPQEA | 14 |
| 70 | SVPLLTHPAQ | 13 |
| 83 | VLVPEAHPNA | 13 |
| 84 | LVPEAHPNAS | 13 |
| 95 | TMYVCAPVPH | 13 |
| 97 | YVCAPVPHPD | 13 |
| 121 | SIDTDPPADG | 13 |
| 170 | QVWSVVSPAP | 13 |
| 174 | VVSPAPSRGQ | 13 |
| 44 | CCSGDPASYR | 12 |
| 67 | PQASVPLLTH | 12 |
| 88 | AHPNASLTMY | 12 |
| 101 | PVPHPDPPMA | 12 |
| 143 | AFSTLNPVLR | 12 |
| 11 | RTSRAVTPTC | 11 |
| 14 | RAVTPTCATP | 11 |
| 28 | PCSRLPPSLR | 11 |
| 134 | PLCCCFHGPA | 11 |

[1282] TABLE XXXVII

V19-HLA-
A3-10mers-PSCA
Each peptide is a portion
of SEQ ID NO: 8; each
start position is specified,
the length of peptide is 10
amino acids, and the end
position for each peptide
is the start position plus
nine.

| | | |
|---|---|---|
| Pos | 1234567890 | score |

| | | |
|---|---|---|
| 8 | RLLPSLRCSL | 22 |
| 9 | LLESLRCSLH | 17 |
| 5 | PCSRLLPSLR | 11 |

[1283] TABLE XXXVII

V20-HLA-A3-
10mers-PSCA
Each peptide is a portion of
SEQ ID NO: 8; each start
position is specified, the
length of peptide is 10
amino acids, and the end
position for each peptide is
the start position plus nine.

| | | |
|---|---|---|
| Pos | 1234567890 | score |

| | | |
|---|---|---|
| 2 | CCSGDPASSR | 14 |
| 8 | ASSRLWGAPL | 12 |
| 10 | SRLWGAELQP | 10 |
| 1 | ACCSGDPASS | 9 |
| 9 | SSRLWGAPLQ | 8 |
| 5 | GDPASSRLWG | 7 |

[1284] TABLE XXXVII

V21-HLA-
A3-10mers-PSCA
Each peptide is a portion
of SEQ ID NO: 8; each
start position is specified,
the length of peptide is 10
amino acids, and the end
position for each peptide is
the start position plus nine.

| | | |
|---|---|---|
| Pos | 1234567890 | score |

| | | |
|---|---|---|
| 6 | PLLTDPAQWE | 16 |
| 4 | SVPLLTDPAQ | 13 |
| 7 | LLIDPAQWEP | 11 |
| 5 | VPLLTDPAQW | 10 |
| 1 | PQASVPLLTD | 8 |

[1285] TABLE XXXVII

V21&22-
HLA-A3-10mers-PSCA
Each peptide is a portion
of SEQ ID NO: 8; each
start position is specified,
the length of peptide is 10
amino acids, and the end
position for each peptide is
the start position plus nine.

| | | |
|---|---|---|
| Pos | 1234567890 | score |

| | | |
|---|---|---|
| 3 | SVPLLTDLAQ | 16 |
| 5 | PLLTDLAQWE | 16 |
| 9 | DLAQWEPVLV | 16 |
| 6 | LLTDLAQWEP | 11 |
| 4 | VPLLTDLAQW | 9 |
| 8 | TDLAQWEPVL | 8 |

[1286] TABLE XXXVII

V22-HLA-A3-
10mers-PSCA
Each peptide is a portion
of SEQ ID NO: 8; each
start position is specified,
the length of peptide is 10
amino acids, and the end
position for each peptide is
the start position plus nine.

| | | |
|---|---|---|
| Pos | 1234567890 | score |

| | | |
|---|---|---|
| 3 | SVPLLTHLAQ | 16 |
| 5 | PLLTHLAQWE | 16 |
| 9 | HLAQWEPVLV | 16 |
| 6 | LLTHLAQWEP | 10 |
| 4 | VPLLTHLAQW | 9 |
| 8 | THLAQWEPVL | 8 |
| 10 | LAQWEPVLVP | 7 |

[1287] TABLE XXXVI

V24-HLA-
A0203-10mers-PSCA
Each peptide is a portion
of SEQ ID NO: 8; each
start position is specified,
the length of peptide is 10
amino acids, and the end
position for each peptide is
the start position plus nine.

| | | |
|---|---|---|
| Pos | 1234567890 | score |

| | | |
|---|---|---|
| 5 | TMYVCTPVPH | 13 |
| 3 | SLTMYVCTPV | 12 |
| 7 | YVCTPVPHPD | 11 |
| 2 | ASLTMYVCTP | 9 |

[1288] TABLE XXXVI

V25-HLA-
A0203-10mers-PSCA
Each peptide is a portion
of SEQ ID NO: 8; each
start position is specified,
the iength of peptide is 10
amino acids, and the end
position for each peptide
is the start position plus
nine.

| | | |
|---|---|---|
| Pos | 1234567890 | score |

| | | |
|---|---|---|
| 8 | QISSIDTDPP | 10 |
| 3 | RTPTRQISSI | 9 |
| 7 | RQISSIDTDP | 8 |
| 10 | SSIDTDPPAD | 7 |
| 2 | SRTPTRQISS | 6 |
| 4 | TPTRQISSID | 6 |
| 6 | TRQISSIDTD | 5 |
| 1 | LSRTPTRQIS | 4 |

[1289] TABLE XXXVI

V25&26-
HLA-A0203-10mers-PSCA
Each peptide is a portion
of SEQ ID NO: 8; each
start position is specified,
the length of peptide is 10
amino acids, and the end
position for each peptide is
the start position plus nine.

| | | |
|---|---|---|
| Pos | 1234567890 | score |

| | | |
|---|---|---|
| 7 | ISSSDTDPPA | 10 |
| 8 | SSSDTDEPAD | 9 |

[1290] TABLE XXXVII

V26-HLA-A3-
10mers-PSCA
Each peptide is a portion
of SEQ ID NO: 8; each
start position is specified,
the length of peptide is 10
amino acids, and the end
position for each peptide is
the start position plus nine.

| | | |
|---|---|---|
| Pos | 1234567890 | score |

| | | |
|---|---|---|
| 2 | TPTRQIGSSD | 11 |
| 5 | RQIGSSDTDP | 10 |
| 6 | QIGSSDTDPP | 10 |
| 1 | RTRTRQIGSS | 7 |
| 3 | PTRQIGSSDT | 6 |
| 4 | TRQIGSSDTD | 5 |
| 9 | SSDTDPPADG | 5 |
| 10 | SDTDPPADGP | 5 |

[1291] TABLE XXXVII

V27-HLA-A3-
10mers-PSCA
Each peptide is a portion of
SEQ ID NO: 8; each start
position is specified, the
length of peptide is 10
amino acids, and the end
position for each peptide is
the start position plus nine.

| | | |
|---|---|---|
| Pos | 1234567890 | score |

| | | |
|---|---|---|
| 1 | PSRGQALRRA | 5 |
| 2 | SRGQALRRAQ | 3 |

[1292] TABLE XXXVIII

V1-HLA-A26-10mers-PSCA
Each peptide is a portion of
SEQ ID NO: 2; each start
position is specified, the
length of peptide is 10
amino acids, and the end
position for each peptide is
the start position plus nine.

| | | |
|---|---|---|
| Pos | 1234567890 | score |

| | | |
|---|---|---|
| 59 | LTVISKGCSL | 22 |
| 60 | TVISKGCSLN | 17 |
| 88 | DTDLCNASGA | 17 |
| 104 | AAILALLPAL | 17 |
| 49 | WTARIRAVGL | 16 |
| 55 | AVGLLTVISK | 16 |
| 3 | AVLLALLMAG | 15 |
| 15 | LQPGTALLCY | 15 |
| 69 | NCVDDSQDYY | 15 |
| 73 | DSQDYYVGKK | 15 |
| 50 | TARIRAVGLL | 14 |
| 78 | YVGKKNITCC | 14 |
| 100 | LQPAAAILAL | 14 |
| 107 | LALLPALGLL | 13 |
| 29 | QVSNEDCLQV | 12 |
| 39 | ENCTQLGEQC | 12 |
| 82 | KNITCCDTDL | 12 |
| 101 | QPAAAILALL | 12 |
| 6 | LALLMAGLAL | 11 |
| 37 | QVENCTQLGE | 11 |
| 46 | EQCWTARIRA | 11 |
| 70 | CVDDSQDYYV | 11 |
| 108 | ALLPALGLLL | 11 |
| 2 | KAVLLALLMA | 10 |
| 12 | GLALQPGTAL | 10 |
| 33 | EDCLQVENCT | 10 |
| 52 | RIRAVGLLTV | 10 |
| 68 | LNCVDDSQDY | 10 |
| 114 | GLLLWGPGQL | 10 |

[1293] TABLE XXXVIII

V4-HLA-
A26-10mers-PSCA
Each peptide is a portion of
SEQ ID NO: 2; each start
position is specified, the
length of peptide is 10
amino acids, and the end
position for each peptide is
the start position plus nine.

| | | |
|---|---|---|
| Pos | 1234567890 | score |

| | | |
|---|---|---|
| 64 | GVVPQASVPL | 23 |
| 65 | VVPQASVPLL | 22 |
| 145 | STLNPVLRHL | 21 |
| 123 | DTDPPADGPS | 18 |
| 173 | SVVSPAPSRG | 17 |
| 158 | EAFPAHPIYD | 16 |
| 88 | AHPNASLTMY | 15 |
| 81 | EPVLVPEAHP | 14 |
| 113 | RTPTRQIGSI | 14 |
| 48 | DPASYRLWGA | 13 |
| 84 | LVPEAHPNAS | 13 |
| 87 | EAHPNASLTM | 13 |
| 129 | DGPSNPLCCC | 13 |
| 142 | PAFSTLNPVL | 13 |
| 15 | AVTPTCATPA | 12 |
| 43 | ACCSGDPASY | 12 |
| 70 | SVPLLTHPAQ | 12 |
| 159 | AFPAHPIYDL | 12 |
| 170 | QVWSVVSPAP | 12 |
| 176 | SPAPSRGQAL | 12 |
| 5 | TTTWARRTSR | 11 |
| 101 | PVPHPDPPMA | 11 |
| 149 | PVLRHLFPQE | 11 |
| 174 | VVSPAPSRGQ | 11 |

[1294] TABLE XXXVIII

V19-HLA-
A26-10mers-PSCA
Each peptide is a portion
of SEQ ID NO: 8; each
start position is specified,
the length of peptide is 10
amino acids, and the end
position for each peptide is
the start position plus nine.

| | | |
|---|---|---|
| Pos | 1234567890 | score |

| | | |
|---|---|---|
| 4 | MPCSRLLPSL | 14 |
| 8 | RLLPSLRCSL | 10 |
| 1 | AGPMPCSRLL | 8 |

[1295] TABLE XXXVIII

V20-HLA-
A26-10mers-PSCA
Each peptide is a portion of
SEQ ID NO: 8; each start
position is specified, the
length of peptide is 10
amino acids, and the end
position for each peptide is
the start position plus nine.

| | | |
|---|---|---|
| Pos | 1234567890 | score |

| | | |
|---|---|---|
| 6 | DPASSRLWGA | 13 |
| 3 | CSGDPASSRL | 10 |
| 8 | ASSRLWGAPL | 9 |

[1296] TABLE XXXVIII

V21-HLA-A26-10mers-PSCA
Each peptide is a portion of SEQ ID NO: 8;
each start position is specified, the
length of peptide is 10 amino acids, and
the end position for each peptide is the
start position plus nine.

| | | |
|---|---|---|
| Pos | 1234567890 | score |

| | | |
|---|---|---|
| 4 | SVPLLTDPAQ | 12 |
| 8 | LTDPAQWEPV | 9 |
| 9 | TDPAQWEPVL | 9 |
| 10 | DPAQWEPVLV | 8 |
| 1 | PQASVPLLTD | 7 |
| 3 | ASVPLLTDPA | 5 |

[1297] TABLE XXXVIII

V21 & V22-HLA-A26-10mers-PSCA
Each peptide is a portion of SEQ ID NO: 8;
each start position is specified, the
length of peptide is 10 amino acids, and
the end position for each peptide is the
start position plus nine.

| | | |
|---|---|---|
| Pos | 1234567890 | score |

| | | |
|---|---|---|
| 3 | SVPLLTDLAQ | 13 |
| 1 | QASVPLLTDL | 12 |
| 8 | TDLAQWEPVL | 9 |
| 7 | LTDLAQWEPV | 8 |
| 9 | DLAQWEPVLV | 8 |

[1298] TABLE XXXVIII

V22-HLA-A26-10mers-PSCA
Each peptide is a portion of SEQ ID NO: 8;
each start position is specified, the
length of peptide is 10 amino acids, and
the end position for each peptide is the
start position plus nine.

| | | |
|---|---|---|
| Pos | 1234567890 | score |

| | | |
|---|---|---|
| 3 | SVPLLTHLAQ | 13 |
| 1 | QASVPLLTHL | 12 |
| 8 | THLAQWEPVL | 9 |
| 7 | LTHLAQWEPV | 8 |

[1299] TABLE XXXVIII

V24-HLA-A26-10mers-PSCA
Each peptide is a portion of SEQ ID NO: 8;
each start position is specified, the
length of peptide is 10 amino acids, and
the end position for each peptide is the
start position plus nine.

| | | |
|---|---|---|
| Pos | 1234567890 | score |

| | | |
|---|---|---|
| 7 | YVCTPVPHPD | 10 |
| 4 | LTMYVCTPVP | 8 |
| 6 | MYVCTPVPHP | 8 |
| 9 | CTPVPHPDPP | 8 |
| 10 | TPVPHPDPPM | 6 |
| 2 | ASLTMYVCTP | 5 |

[1300] TABLE XXXVIII

V25-HLA-A26-10mers-PSCA
Each peptide is a portion of SEQ ID NO: 8;
each start position is specified, the
length of peptide is 10 amino acids, and
the end position for each peptide is the
start position plus nine.

| | | |
|---|---|---|
| Pos | 1234567890 | score |

| | | |
|---|---|---|
| 3 | RTPTRQISSI | 14 |
| 5 | PTRQISSIDT | 9 |
| 10 | SSIDTDPPAD | 7 |
| 6 | TRQISSIDTD | 6 |

[1301] TABLE XXXVIII

V25 & V26-HLA-A26-10mers-PSCA
Each peptide is a portion of SEQ ID NO: 8;
each start position is specified, the
length of peptide is 10 amino acids, and
the end position for each peptide is the
start position plus nine.

| | | |
|---|---|---|
| Pos | 1234567890 | score |

| | | |
|---|---|---|
| 1 | RTPTRQISSS | 14 |
| 3 | PTRQISSSDT | 9 |

[1302] TABLE XXXVIII

V26-HLA-A26-10mers-PSCA
Each peptide is a portion of SEQ ID NO: 8;
each start position is specified, the
length of peptide is 10 amino acids, and
the end position for each peptide is the
start position plus nine.

| | | |
|---|---|---|
| Pos | 1234567890 | score |

| | | |
|---|---|---|
| 1 | RTPTRQIGSS | 14 |
| 3 | PTRQIGSSDT | 9 |

[1303] TABLE XXXVIII

V27-HLA-A26-10mers-PSCA
Each peptide is a portion of SEQ ID NO: 8;
each start position is specified, the
length of peptide is 10 amino acids, and
the end position for each peptide is the
start position plus nine.

| | | |
|---|---|---|
| Pos | 1234567890 | score |

| | | |
|---|---|---|
| 1 | PSRGQALRRA | 4 |
| 2 | SRGQALRRAQ | 2 |

[1304] TABLE XXXIX

V1-HLA-
B0702-10mers-PSCA
Each peptide is a portion
of SEQ ID NO: 2; each
start position is specified,
the length of peptide is 10
amino acids, and the end
position for each peptide is
the start position plus nine.

| | | |
|---|---|---|
| Pos | 1234567890 | score |

| | | |
|---|---|---|
| 101 | QPAAAILALL | 23 |
| 108 | ALLPALGLLL | 15 |
| 100 | LQPAAAILAL | 14 |
| 104 | AAILALLPAL | 14 |
| 106 | ILALLPALGL | 14 |
| 6 | LALLMAGLAL | 13 |
| 12 | GLALQPGTAL | 13 |
| 49 | WTARIRAVGL | 13 |
| 50 | TARIRAVGLL | 13 |
| 110 | LPALGLLLWG | 13 |
| 4 | VLLALLMAGL | 12 |
| 13 | LALQPGTALL | 12 |
| 52 | RIRAVGLLTV | 12 |
| 82 | KNITCCDTDL | 12 |
| 91 | LCNASGAHAL | 12 |
| 103 | AAAILALLPA | 12 |
| 16 | QPGTALLCYS | 11 |
| 27 | KAQVSNEDCL | 11 |
| 35 | CLQVENCTQL | 11 |
| 94 | ASGAHALQPA | 11 |
| 97 | AHALQPAAAI | 11 |
| 98 | HALQPAAAIL | 11 |

TABLE XXXIX

V4-HLA-
B0702-10mers-PSCA
Each peptide is a portion
of SEQ ID NO: 8; each
start position is specified,
the length of peptide is 10
amino acids, and the end
position for each peptide is
the start position plus nine.

| | | |
|---|---|---|
| Pos | 1234567890 | score |

| | | |
|---|---|---|
| 176 | SPAPSRGQAL | 23 |
| 85 | VPEAHPNASL | 22 |
| 102 | VPHPDPPMAL | 22 |
| 126 | PPADGPSNPL | 22 |
| 27 | MPCSRLPPSL | 21 |
| 100 | APVPHPDPPM | 21 |
| 107 | PPMALSRTPT | 21 |
| 57 | APLQPTLGVV | 19 |
| 66 | VPQASVPLLT | 19 |
| 76 | HPAQWEPVLV | 19 |
| 60 | QPTLGVVPQA | 18 |
| 89 | HPNASLTMYV | 18 |
| 130 | GPSNPLCCCF | 18 |
| 141 | GPAFSTLNPV | 18 |
| 48 | DPASYRLWGA | 17 |
| 25 | GPMPCSRLPP | 16 |
| 178 | APSRGQALRR | 16 |
| 33 | PPSLRCSLHS | 14 |
| 50 | ASYRLWGAPL | 14 |
| 64 | GVVPQASVPL | 14 |
| 104 | HPDPPMALSR | 14 |
| 22 | TPAGPMPCSR | 13 |
| 31 | RLPPSLRCSL | 13 |
| 54 | LWGAPLQPTL | 13 |
| 75 | THPAQWEPVL | 13 |
| 138 | CFHGPAFSTL | 13 |
| 159 | AFPAHPIYDL | 13 |
| 23 | PAGPMPCSRL | 12 |
| 65 | VVPQASVPLL | 12 |
| 81 | EPVLVPEAHP | 12 |
| 142 | PAFSTLNPVL | 12 |
| 8 | WARRTSRAVT | 11 |
| 15 | AVTPTCATPA | 11 |
| 17 | TPTCATPAGP | 11 |
| 45 | CSGDPASYRL | 11 |
| 69 | ASVPLLTHPA | 11 |
| 71 | VPLLTHPAQW | 11 |
| 110 | ALSRTPTRQI | 11 |
| 119 | IGSIDTDPPA | 11 |
| 125 | DPPADGPSNP | 11 |
| 133 | NPLCCCFHGP | 11 |
| 148 | NPVLRHLFPQ | 11 |
| 155 | FPQEAFPAHP | 11 |
| 160 | FPAHPIYDLS | 11 |
| 163 | HPIYDLSQVW | 11 |

[1305] TABLE XXXIX

V19-HLA-
B0702-10mers-PSCA
Each peptide is a portion
of SEQ ID NO: 8; each
start position is specified,
the length of peptide is 10
amino acids, and the end
position for each peptide is
the start position plus nine.

| | | |
|---|---|---|
| Pos | 1234567890 | score |

| | | |
|---|---|---|
| 4 | MPCSRLLPSL | 21 |
| 2 | GPMPCSRLLP | 15 |
| 10 | LPSLRCSLHS | 14 |
| 8 | RLLPSLRCSL | 13 |
| 1 | AGPMPCSRLL | 12 |

[1306] TABLE XXXIX

V20-HLA-
B0702-10mers-PSCA
Each peptide is a portion of
SEQ ID NO: 8; each start
position is specified, the
length of peptide is 10
amino acids, and the end
position for each peptide is
the start position plus nine.

| | | |
|---|---|---|
| Pos | 1234567890 | score |

| | | |
|---|---|---|
| 6 | DPASSRLWGA | 17 |
| 8 | ASSRLWGAPL | 16 |
| 3 | CSGDPASSRL | 11 |

[1307] TABLE XXXIX

V21-HLA-
B0702-10mers-PSCA
Each peptide is a portion of
SEQ ID NO: 8; each start
position is specified, the
length of peptide is 10
amino acids, and the end
position for each peptide is
the start position plus nine.

| | | |
|---|---|---|
| Pos | 1234567890 | score |

| | | |
|---|---|---|
| 10 | DPAQWEPVLV | 19 |
| 9 | TDPAQWEPVL | 13 |
| 3 | ASVPLLTDPA | 11 |
| 5 | VPLLTDPAQW | 11 |
| 8 | LTDPAQWEPV | 9 |

[1308] TABLE XXXIX

V21&22-HLA-
B0702-10mers-PSCA
Each peptide is a portion
of SEQ ID NO: 8; each
start position is specified,
the length of peptide is 10
amino acids, and the end
position for each peptide is
the start position plus nine.

| | | |
|---|---|---|
| Pos | 1234567890 | score |

| | | |
|---|---|---|
| 1 | QASVPLLTDL | 13 |
| 8 | TDLAQWEPVL | 13 |
| 4 | VPLLTDLAQW | 11 |
| 2 | ASVPLLTDLA | 10 |
| 9 | DLAQWEPVLV | 9 |
| 7 | LTDLAQWEPV | 8 |

[1309] TABLE XXXIX

V22-HLA-
B0702-10mers-PSCA
Each peptide is a portion
of SEQ ID NO: 8; each
start position is specified,
the length of peptide is 10
amino acids, and the end
position for each peptide is
the start position plus nine.

| | | |
|---|---|---|
| Pos | 1234567890 | score |

| | | |
|---|---|---|
| 1 | QASVPLLTHL | 13 |
| 8 | THLAQWEPVL | 13 |
| 4 | VPLLTHLAQW | 11 |
| 2 | ASVPLLTHLA | 10 |
| 9 | HLAQWEPVLV | 9 |

[1310] TABLE XXXIX

V24-HLA-
B0702-10mers-PSCA
Each peptide is a portion
of SEQ ID NO: 8; each
start position is specified,
the length of peptide is 10
amino acids, and the end
position for each peptide is
the start position plus nine.

| | | |
|---|---|---|
| Pos | 1234567890 | score |

| | | |
|---|---|---|
| 10 | TPVPHPDPPM | 19 |
| 1 | NASLTMYVCT | 10 |

[1311] TABLE XXXIX

V25-HLA-
B0702-10mers-PSCA
Each peptide is a portion
of SEQ ID NO: 8; each
start position is
specified, the length of
peptide is 10 amino
acids, and the end
position for each peptide
is the start position plus
nine.

| | | |
|---|---|---|
| Pos | 1234567890 | score |

| | | |
|---|---|---|
| 9 | ISSIDTDPPA | 11 |
| 4 | TPTRQISSID | 10 |
| 5 | PTRQISSIDT | 8 |
| 3 | RTPTRQISSI | 7 |

[1312] TABLE XXXIX

V25&26-
HLA-B0702-10mers-
PSCA
Each peptide is a portion
of SEQ ID NO: 8; each
start position is specified,
the length of peptide is 10
amino acids, and the end
position for each peptide
is the start position plus
nine.

| | | |
|---|---|---|
| Pos | 1234567890 | score |

| | | |
|---|---|---|
| 7 | ISSSDTDPPA | 11 |
| 2 | TPTRQISSSD | 10 |
| 3 | PTRQISSSDT | 8 |

[1313] TABLE XXXIX

V26-HLA-
B0702-10mers-PSCA
Each peptide is a portion
of SEQ ID NO: 8; each
start position is specified,
the length of peptide is 10
amino acids, and the end
position for each peptide
the start position plus nine.

| | | |
|---|---|---|
| Pos | 1234567890 | score |

| | | |
|---|---|---|
| 7 | IGSSDTDPPA | 11 |
| 2 | TPTRQIGSS | 10 |
| 3 | PTRQIGSSDT | 8 |

[1314] TABLE XXXIX

V27-HLA-B0702-10mers-PSCA Each peptide is a
portion of SEQ ID NO: 8; each start position is
specified, the length of peptide is 10 amino
acids, and the end position for each peptide is
the start position plus nine.

| Pos | 1234567890 | score |
|---|---|---|
| 1 | PSRGQALRRA | 10 |

[1315] TABLE XL

V1-HLA-B08-
10mers-PSCA

| | | |
|---|---|---|
| Pos | 1234567890 | score |

NoResultsFound.

[1316] TABLE XL

V4-HLA-B08-
10mers-PSCA

| | | |
|---|---|---|
| Pos | 1234567890 | score |

NoResultsFound.

[1317] TABLE XL

V19-HLA-B08-
10mers-PSCA

| | | |
|---|---|---|
| Pos | 1234567890 | score |

NoResultsFound.

[1318] TABLE XL

V20-HLA-B08-
10mers-PSCA

| | | |
|---|---|---|
| Pos | 1234567890 | score |

NoResultsFound.

[1319] TABLE XL

V21-HLA-B08-
10mers-PSCA

| | | |
|---|---|---|
| Pos | 1234567890 | score |

NoResultsFound.

[1320] TABLE XL

V21&22-HLA-
B08-1Omers-PSCA

| | | |
|---|---|---|
| Pos | 1234567890 | score |

NoResultsFound.

[1321] TABLE XL

V22HLA-B08-
10mers-PSCA

| | | |
|---|---|---|
| Pos | 1234567890 | score |

NoResultsFound.

[1322] TABLE XL

V24-HLA-B08-
10mers-PSCA

| | | |
|---|---|---|
| Pos | 1234567890 | score |

NoResultsFound.

[1323] TABLE XL

V25-HLA-B08-
10mers-PSCA

| | | |
|---|---|---|
| Pos | 1234567890 | score |

NoResultsFound.

[1324] TABLE XL

V25&26-HLA-
B08-10mers-PSCA

| | | |
|---|---|---|
| Pos | 1234567890 | score |

NoResultsFound.

[1325] TABLE XL

V26-HLA-B08-
10mers-PSCA

| | | |
|---|---|---|
| Pos | 1234567890 | score |

NoResultsFound.

[1326] TABLE XLI

V1-HLA-
B1510-10mers-PSCA

| | | |
|---|---|---|
| Pos | 1234567890 | score |

NoResuitsFound.

[1327] TABLE XLI

V4-HLA-
B1510-10mers-PSCA

| | | |
|---|---|---|
| Pos | 1234567890 | score |

NoResultsFound.

[1328] TABLE XLI

V19-HLA-
B1510-10mers-PSCA

| | | |
|---|---|---|
| Pos | 1234567890 | score |

NoResultsFound.

[1329] TABLE XLI

V20-HLA-
B1510-10mers-PSCA

| | | |
|---|---|---|
| Pos | 1234567890 | score |

NoResultsFound.

[1330] TABLE XLI

V21-HLA-
B1510-10mers-PSCA

| | | |
|---|---|---|
| Pos | 1234567890 | score |

NoResultsFound.

[1331] TABLE XLI

V21&22-HLA-
B1510-10mers-PSCA

| | | |
|---|---|---|
| Pos | 1234567890 | score |

NoResultsFound.

[1332] TABLE XLI

V22-HLA-1
B1510-10mers-PSCA

| | | |
|---|---|---|
| Pos | 1234567890 | score |

NoResultsFound.

[1333] TABLE XLI

V24-HLA-1
B1510-10mers-PSCA

| | | |
|---|---|---|
| Pos | 1234567890 | score |

NoResultsFound.

[1334] TABLE XLI

V25-HLA-1
B1510-10mers-PSCA

| | | |
|---|---|---|
| Pos | 1234567890 | score |

NoResultsFound.

[1335] TABLE XLI

V25&26-HLA-
B1510-10mers-PSCA

| | | |
|---|---|---|
| Pos | 1234567890 | score |

NoResultsFound.

[1336] TABLE XLI

V26-HLA-
B1510-10mers-PSCA

| | | |
|---|---|---|
| Pos | 1234567890 | score |

NoResultsFound.

[1337] TABLE XLII

V1-HLA-
B2705-10mers-PSCA

| | | |
|---|---|---|
| Pos | 1234567890 | score |

NoResultsFound.
ps
TABLE XLII
V4-HLA-
B2705-10mers-PSCA

| | | |
|---|---|---|
| Pos | 1234567890 | score |

NoResultsFound.

[1338] TABLE XLII

V19-HLA-
B2705-10mers-PSCA

| | | |
|---|---|---|
| Pos | 1234567890 | score |

NoResultsFound.

[1339] TABLE XLII

V20-HLA-
B2705-10mers-PSCA

| | | |
|---|---|---|
| Pos | 1234567890 | score |

NoResultsFound.

[1340] TABLE XLII

V21-HLA-
B2705-10mers-PSCA

| | | |
|---|---|---|
| Pos | 1234567890 | score |

NoResultsFound.

[1341] TABLE XLII

V21&22-
HLA-B2705-10mers-
PSCA

| | | |
|---|---|---|
| Pos | 1234567890 | score |

NoResultsFound.

[1342] TABLE XLII

V22-HLA-
B2705-10mers-PSCA

| | | |
|---|---|---|
| Pos | 1234567890 | score |

NoResultsFound.

[1343] TABLE XLII

V24-HLA-
B2705-10mers-PSCA

| | | |
|---|---|---|
| Pos | 1234567890 | score |

NoResultsFound.

[1344] TABLE XLII

V25-HLA-
B2705-10mers-PSCA

| | | |
|---|---|---|
| Pos | 1234567890 | score |

NoResultsFound.

[1345] TABLE XLII

V25&26-HLA-
B2705-10mers-PSCA

| | | |
|---|---|---|
| Pos | 1234567890 | score |

NoResultsFound.

[1346] TABLE XLII

V26-HLA
B2705-10mers-PSCA

| | | |
|---|---|---|
| Pos | 1234567890 | score |

NoResultsFound.

[1347] TABLE XLIII

V1-HLA-
B2709-10mers-PSCA

| | | |
|---|---|---|
| Pos | 1234567890 | score |

NoResultsFound.

[1348] TABLE XLIII

V4-HLA-
B2709-10mers-PSCA

| | | |
|---|---|---|
| Pos | 1234567890 | score |

NoResultsFound.

[1349] TABLE XLIII

V19-HLA-
B2709-10mers-PSCA

| | | |
|---|---|---|
| Pos | 1234567890 | score |

NoResultsFound.

[1350] TABLE XLIII

V20-HLA-
B2709-10mers-PSCA

| | | |
|---|---|---|
| Pos | 1234567890 | score |

NoResultsFound.

[1351] TABLE XLIII

V21-HLA-
B2709-10mers-PSCA

| | | |
|---|---|---|
| Pos | 1234567890 | score |

NoResultsFound.

[1352] TABLE XLIII

V21&22-
HLA-B2709-10mers-PSCA

| | | |
|---|---|---|
| Pos | 1234567890 | score |

NoResultsFound.

[1353] TABLE XLIII

V22-HLA-
B2709-10mers-PSCA

| | | |
|---|---|---|
| Pos | 1234567890 | score |

NoResultsFound.

[1354] TABLE XLIII

V24-HLA-
B2709-10mers-PSCA

| | | |
|---|---|---|
| Pos | 1234567890 | score |

NoResultsFound.

[1355] TABLE XLIII

V25-HLA-
B2709-10mers-PSCA

| | | |
|---|---|---|
| Pos | 1234567890 | score |

NoResultsFound.

[1356] TABLE XLIII

V25&26-HLA-
B2709-10mers-PSCA

| | | |
|---|---|---|
| Pos | 1234567890 | score |

NoResultsFound.

[1357] TABLE XLIII

V26-HLA-
B2709-10mers-PSCA

| | | |
|---|---|---|
| Pos | 1234567890 | score |

NoResultsFound.

[1358] TABLE XLIV

V1-HLA-B4402-
10mers-PSCA
Each peptide is a portion of
SEQ ID NO: 2; each start
position is specified, the
length of peptide is 10
amino acids, and the end
position for each peptide is
the start position plus nine.

| | | |
|---|---|---|
| Pos | 1234567890 | score |

| | | |
|---|---|---|
| 104 | AAILALLPAL | 20 |
| 108 | ALLPALGLLL | 19 |
| 100 | LQPAAAILAL | 17 |
| 6 | LALLMAGLAL | 15 |
| 82 | KNITCCDTDL | 15 |
| 97 | AHALQPAAAI | 15 |
| 15 | LQPGTALLCY | 14 |
| 91 | LCNASGAHAL | 14 |
| 107 | LALLPALGLL | 14 |
| 109 | LLPALGLLLW | 14 |
| 114 | GLLLWGPGQL | 14 |
| 12 | GLALQPGTAQ | 13 |
| 13 | LALQPGTALL | 13 |
| 32 | NEDCLQVENC | 13 |
| 49 | WTARIRAVGL | 13 |
| 106 | ILALLPALGL | 13 |
| 45 | GEQCWTARIR | 12 |
| 50 | TARIRAVGLL | 12 |
| 69 | NCVDDSQDYY | 12 |
| 98 | HALQPAAAIL | 12 |
| 101 | QPAAAILALL | 12 |
| 4 | VLLALLMAGL | 11 |
| 27 | KAQVSNEDCL | 11 |
| 35 | CLQVENCTQL | 11 |
| 38 | VENCTQLGEQ | 11 |
| 40 | NCTQLGEQCW | 11 |
| 53 | IRAVGLLTVI | 10 |
| 59 | LTVISKGCSL | 10 |
| 68 | LNCVDDSQDY | 10 |
| 75 | QDYYVGKKNI | 10 |
| 14 | ALQPGTALLC | 9 |
| 44 | LGEQCWTARI | 9 |
| 51 | ARIRAVGLLT | 9 |
| 99 | ALQPAAAILA | 9 |

[1359] TABLE XLIV

V4-HLA-B4402-
10mers-PSCA
Each peptide is a portion of
SEQ ID NO: 8; each start
position is specified, the
length of peptide is 10
amino acids, and the end
position for each peptide is
the start position plus nine.

| | | |
|---|---|---|
| Pos | 1234567890 | score |

| | | |
|---|---|---|
| 157 | QEAFPAHPIY | 20 |
| 46 | SGDPASYRLW | 17 |
| 159 | AFPAHPIYDL | 17 |
| 88 | AHPNASLTMY | 16 |
| 102 | VPHPDPPMAL | 16 |
| 110 | ALSRTPTRQI | 16 |
| 146 | TLNPVLRHLF | 16 |
| 176 | SPAPSRGQAL | 16 |
| 31 | RLPPSLRCSL | 15 |
| 145 | STLNPVLRHL | 15 |
| 43 | ACCSGDPASY | 14 |
| 50 | ASYRLWGAPL | 14 |
| 64 | GVVPQASVPL | 14 |
| 71 | VPLLTHPAQW | 14 |
| 80 | WEPVLVPEAH | 14 |
| 163 | HPIYDLSQVW | 14 |
| 23 | PAGPMPCSRL | 13 |
| 65 | VVPQASVPLL | 13 |
| 113 | RTPTRQIGSI | 13 |
| 138 | CFHGPAFSTL | 13 |
| 142 | PAFSTLNPVL | 13 |
| 151 | LRHLFPQEAF | 13 |
| 75 | THPAQWEPVL | 12 |
| 86 | PEAHPNASLT | 12 |
| 126 | PPADGPSNPL | 12 |
| 130 | GPSNPLCCCF | 12 |
| 135 | LCCCFHGPAF | 12 |
| 27 | MPCSRLPPSL | 11 |
| 45 | CSGDPASYRL | 11 |
| 54 | LWGAPLQPTL | 11 |
| 85 | VPEAHPNASL | 10 |
| 156 | PQEAFPAHPI | 10 |
| 158 | EAFPAHPIYD | 9 |

[1360] TabIe XLIV

V19-HLA-
B4402-10mers-PSCA
Each peptide is a portion
of SEQ ID NO: 8; each
start position is specified,
the length of peptide is 10
amino acids, and the end
position for each peptide is
the start position plus nine.

| | | |
|---|---|---|
| Pos | 1234567890 | score |

| | | |
|---|---|---|
| 1 | AGPMPCSRLL | 16 |
| 8 | RLLPSLRCSL | 15 |
| 4 | MPCSRLLPSL | 11 |
| 2 | GPMPCSRLLP | 7 |

[1361] TABLE XLIV

V20-HLA-B4402-
10mers-PSCA
Each peptide is a portion of
SEQ ID NO: 8; each start
position is specified, the
length of peptide is 10
amino acids, and the end
position for each peptide is
the start position plus nine.

| | | |
|---|---|---|
| Pos | 1234567890 | score |

| | | |
|---|---|---|
| 4 | SGDPASSRLW | 17 |
| 8 | ASSRLWGAPL | 15 |
| 3 | CSGDPASSRL | 11 |

[1362] TABLE XLIV

V21-HLA-
B4402-10mers-PSCA
Each peptide is a portion
of SEQ ID NO: 8; each
start posidon is specified,
the length of pepUde is 10
amino acids, and the end
position for each pepdde is
the start position plus nine.

| | | |
|---|---|---|
| Pos | 1234567890 | score |

| | | |
|---|---|---|
| 5 | VPLLTDPAQW | 14 |
| 9 | TDPAQWEPVL | 12 |
| 3 | ASVPLLTDPA | 7 |

[1363] TABLE XLIV

V21&22-HLA-
B4402-10mers-PSCA
Each peptide is a portion
of SEQ ID NO: 8; each
start position is specified,
the length of peptide is 10
amino acids, and the end
position for each peptide is
the start position plus nine.

| | | |
|---|---|---|
| Pos | 1234567890 | score |

| | | |
|---|---|---|
| 4 | VPLLTDLAQW | 14 |
| 1 | QASVPLLTDL | 12 |
| 8 | TDLAQWEPVL | 12 |
| 2 | ASVPLLTDLA | 8 |
| 3 | SVPLLTDLAQ | 6 |

[1364] TABLE XLIV

V22-HLA-
B4402-10mers-PSCA
Each peptide is a portion
of SEQ ID NO: 8; each
start position is specified,
the lenght of peptide is 10
amino acids, and the end
position for each peptide is
the start position plus nine.

| | | |
|---|---|---|
| Pos | 1234567890 | score |

| | | |
|---|---|---|
| 4 | VPLLTHLAQW | 14 |
| 1 | QASVPLLTHL | 12 |
| 8 | THLAQWEPVL | 12 |
| 2 | ASVPLLTHLA | 9 |
| 3 | SVPLLTHLAQ | 6 |

[1365] TABLE XLIV

V24-HLA-
B4402-10mers-PSCA
Each peptide is a portion
of SEQ ID NO: 8; each
start position is specified,
the length of peptide is 10
amino acids, and the end
position for each peptide is
the start position plus nine.

| | | |
|---|---|---|
| Pos | 1234567890 | score |

| | | |
|---|---|---|
| 2 | ASLTMYVCTP | 7 |
| 1 | NASLTMYVCT | 4 |
| 4 | LTMYVCTPVP | 3 |
| 7 | YVCTPVPHPD | 3 |
| 8 | VCTPVPHPDP | 3 |
| 10 | TPVPHPDPPM | 3 |

[1366] TABLE XLIV

V25-HLA-
B4402-10mers-PSCA
Each peptide is a portion
of SEQ ID NO: 8; each
start position is specified,
the length of peptide is 10
amino acids, and the end
position for each peptide
is the start posidon plus
nine.

| | | |
|---|---|---|
| Pos | 1234567890 | score |

| | | |
|---|---|---|
| 3 | RTPTRQISSI | 13 |
| 10 | SSIDTDPPAD | 8 |

[1367] TABLE XLIV

V25&26-HLA-
B4402-10mers-PSCA
Each peptide is a portion
of SEQ ID NO: 8; each
start position is specified,
the length of peptide is 10
amino acids, and the end
position for each peptide is
the start position plus nine.

| | | |
|---|---|---|
| Pos | 1234567890 | score |

| | | |
|---|---|---|
| 8 | SSSDTDPPAD | 6 |
| 1 | RTPTRQISSS | 5 |
| 5 | RQISSSDTDP | 3 |
| 6 | QISSSDTDPP | 2 |

[1368] TABLE XLIV

V26-HLA-
B4402-10mers-PSCA
Each peptide is a portion
of SEQ ID NO: 8; each
start posidon is specified,
the length of pepflde is 10
amino acids, and the end
posifion for each peptide is
the start position plus nine.

| | | |
|---|---|---|
| Pos | 1234567890 | score |

| | | |
|---|---|---|
| 1 | RTPTRQIGSS | 5 |
| 8 | GSSDTDPPAD | 5 |
| 5 | RQIGSSDTDP | 4 |
| 9 | SSDTDPPADG | 4 |
| 10 | SDTDPPADGP | 3 |

[1369] TABLE XLIV

V27-HLA-
B4402-10mers-PSCA
Each peptide is a portion of
SEQ ID NO: 8; each start
position is specified, the
length of peptide is 10
amino acids, and the end
position for each peptide is
the start position plus nine.

| | | |
|---|---|---|
| Pos | 1234567890 | score |

| | | |
|---|---|---|
| 2 | SRGQALRRAQ | 5 |
| 1 | PSRGQALRRA | 3 |

[1370] TABLE XLV

V1-HLA-
B5101-10mers-PSCA

| | | |
|---|---|---|
| Pos | 1234567890 | score |

NoResultsFound.

[1371] TABLE XLV

V4-HLA-
B5101-10mers-PSCA

| | | |
|---|---|---|
| Pos | 1234567890 | score |

NoResultsFound.

[1372] TABLE XLV

V19-HLA-
B5101-10mers-PSCA

| | | |
|---|---|---|
| Pos | 1234567890 | score |

NoResultsFound.

[1373] TABLE XLV

V20-HLA-
B4402-10mers-PSCA

| | | |
|---|---|---|
| Pos | 1234567890 | score |

NoResultsFound.

[1374] TABLE XLV

V21-HLA-
B5101-10mers-PSCA

| | | |
|---|---|---|
| Pos | 1234567890 | score |

NoResultsFound.

[1375] TABLE XLV

V21&22-
HLA-B5101-10mers
PSCA

| | | |
|---|---|---|
| Pos | 1234567890 | score |

NoResultsFound.

[1376] TABLE XLV

V22-HLA-
B5101-10mers-PSCA

| | | |
|---|---|---|
| Pos | 1234567890 | score |

NoResultsFound.

[1377] TABLE XLV

V24-HLA-
B5101-10mers-PSCA

| | | |
|---|---|---|
| Pos | 1234567890 | score |

NoResultsFound.

[1378] TABLE XLV

V25-HLA-
B5101-10mers-PSCA

| | | |
|---|---|---|
| Pos | 1234567890 | score |

NoResultsFound.

[1379] TABLE XLV

V25&26-HLA-
B5101-10mers-PSCA

| | | |
|---|---|---|
| Pos | 1234567890 | score |

NoResultsFound.

[1380] TABLE XLV

V26-HLA-
B5101-10mers-PSCA

| | | |
|---|---|---|
| Pos | 1234567890 | score |

NoResultsFound.

[1381] TABLE XLVI

V1-HLA-DRB1-0101-
15mers-PSCA
Each peptide is a portion of SEQ
ID NO: 2; each start position is
specified, the length of peptide is
15 amino acids, and the end
position for each peptide is the
start position plus fourteen.

| | | |
|---|---|---|
| Pos | 123456789012345 | score |

| | | |
|---|---|---|
| 104 | AAILALLPALGLLLW | 35 |
| 3 | AVLLALLMAGLALQP | 33 |
| 10 | MAGLALQPGTALLCY | 32 |
| 2 | KAVLLALLMAGLALQ | 26 |
| 50 | TARIRAVGLLTVISK | 25 |
| 6 | LALLMAGLALQPGTA | 24 |
| 47 | QCWTARIRAVGLLTV | 24 |
| 88 | DTDLCNASGAHALQP | 24 |
| 97 | AHALQPAAAILALLP | 24 |
| 106 | ILALLPALGLLLWGP | 24 |
| 4 | VLLALLMAGLALQPG | 23 |
| 52 | RIRAVGLLTVISKGC | 23 |
| 55 | AVGLLTVISKGCSLN | 23 |
| 56 | VGLLTVISKGCSLNC | 23 |
| 95 | SGAHALQPAAAILAL | 23 |
| 9 | LMAGLALQPGTALLC | 22 |
| 94 | ASGAHALQPAAAILA | 22 |
| 100 | SQPAAAILALLPALG | 22 |
| 103 | AAAILALLPALGLLL | 22 |
| 57 | GLLTVISKGCSLNCV | 20 |
| 86 | CCDTDLCNASGAHAL | 19 |
| 101 | QPAAAILALLPALGL | 19 |
| 89 | TDLCNASGAHALQPA | 18 |
| 109 | LLPALGLLLWGPGQL | 18 |
| 33 | EDCLQVENCTQLGEQ | 17 |
| 53 | IRAVGLLTVISKGCS | 17 |
| 107 | LALLPALGLLLWGPG | 17 |

[1382] TABLE XLVI

V4-HLA-DRB1-0101-
15mers-PSCA
Each peptide is a portion of SEQ ID
NO: 8; each start position is
specified, the length of peptide is
15 amino acids, and the end
position for each peptide is the start
position plus fourteen.

| | | |
|---|---|---|
| Pos | 123456789012345 | score |

| | | |
|---|---|---|
| 148 | NPVLRHLFPQEAFPA | 32 |
| 151 | LRHLFPQEAFPAHPI | 31 |
| 169 | SQVWSbbSPAPSRGQ | 30 |
| 62 | TLGVVPQASVPLLTH | 29 |
| 116 | TRQIGSIDTDPPADG | 28 |
| 165 | IYDLSQVWSVVSPAP | 28 |
| 168 | LSQVWSVVSPAPSRG | 28 |
| 13 | SRAVTPTCATPAGPM | 26 |
| 5 | TTTWARRTSRAVTPT | 25 |
| 48 | DPASYRLWGAPLQPT | 24 |
| 56 | GAPLQPTLGVVPQAS | 24 |
| 77 | PAQWEPVLVPEAHPN | 24 |
| 141 | GPAFSTLNPVLRHLF | 24 |
| 162 | AHPIYDLSQVWSVVS | 24 |
| 10 | RRTSRAVTPTCATPA | 23 |
| 54 | LWGAPLQPTLGVVPQ | 23 |
| 67 | PQASVPLLTHPAQWE | 23 |
| 108 | PMALSRTPTRQIGSI | 23 |
| 144 | FSTLNPVLRHLFPQE | 23 |
| 49 | PASYRLWGAPLQPTL | 22 |
| 60 | QPTLGVVPQASVPLL | 22 |
| 82 | PVLVPEAHPNASLTM | 22 |
| 92 | ASLTMYVCAPVPHPD | 22 |
| 99 | CAPVPHPDPPMALSR | 22 |
| 59 | LQPTLGVVPQASVPQ | 20 |
| 94 | LTMYVOAPVPHPDPP | 19 |
| 120 | GSIDTDPPADGPSNP | 19 |
| 163 | HPIYDLSQVWSVVSP | 19 |
| 7 | TWARRTSRAVTPTCA | 18 |
| 52 | YRLWGAPLQPTLGVV | 18 |
| 91 | NASLTMYVCAPVPHP | 18 |
| 136 | CCCFHGPAFSTLNPV | 18 |
| 157 | QEAFPAHPIYDLSQV | 18 |
| 15 | AVTPTCATPAGPMPC | 17 |
| 35 | SLRCSLHSACCSGDP | 17 |
| 61 | PTLGVVPQASVPLLT | 17 |
| 68 | QASVPLLTHPAQWEP | 17 |
| 71 | VPLLTHPAQWEPVLV | 17 |
| 80 | WEPVLVPEAHPNASL | 17 |
| 81 | EPVLVPEAHPNASLT | 17 |
| 172 | WSVVSPAPSRGQALR | 17 |
| 16 | VTPTCATPAGPMPCS | 16 |
| 17 | TPTCATPAGPMPCSR | 16 |
| 22 | TPAGPMPCSRLPPSL | 16 |
| 24 | AGPMPCSRLPPSLRC | 16 |
| 29 | CSRLPPSLRCSLHSA | 16 |
| 39 | SLHSACCSGDPASYR | 16 |
| 63 | LGVVPQASVPLLTHP | 16 |
| 70 | SVPLLTHPAQWEPVL | 16 |
| 79 | QWEPVLVPEAHPNAS | 16 |
| 104 | HPDPPMALSRTPTRQ | 16 |
| 132 | SNPLCCCFHGPAFST | 16 |
| 133 | NPLCCCFHGPAFSTL | 16 |
| 134 | PLCCCFHGPAFSTLN | 16 |
| 145 | STLNPVLRHLFPQEA | 16 |
| 154 | LFPQEAFPAHPIYDL | 16 |
| 174 | VVSPAPSRGQALRRA | 16 |
| 31 | RLPPSLRCSLHSACC | 16 |
| 53 | RLWGAPLQPTLGVVP | 15 |
| 74 | LTHPAQWEPVLVPEA | 15 |
| 87 | EAHPNASLTMYVDAP | 15 |
| 106 | DPPMALSRTPTRQIG | 15 |
| 112 | SRTPTRQIGSIDTDP | 15 |
| 113 | RTPTRQIGSIDTDPP | 15 |
| 123 | DTDPPADGPSNPLCC | 15 |
| 171 | VWSVVSPAPSRGQAL | 15 |

[1383] TABLE XLVI

V19-HLA-DRB1-0101-
15mers-PSCA
Each peptide is a portion of SEQ ID
NO: 8; each start position is
specified, the length of peptide is
15 amino acids, and the end
position for each peptide is the start
position plus fourteen.

| | | |
|---|---|---|
| Pos | 123456789012345 | score |

| | | |
|---|---|---|
| 9 | MPCSRLLPSLRCSLH | 17 |
| 4 | TPAGPMPCSRLLPSL | 16 |
| 6 | AGPMPCSRLLPSLRC | 16 |
| 11 | CSRLLPSLRCSLHSA | 16 |
| 12 | SRLLPSLRCSLHSAC | 16 |
| 13 | RLLPSLRCSLHSACC | 15 |
| 3 | ATPAGPMPCSRLLPS | 14 |
| 8 | PMPCSRLLPSLRCSL | 14 |
| 10 | PCSRLLPSLRCSLHS | 10 |
| 15 | LPSLRCSLHSACCSG | 10 |
| 1 | TCATPAGPMPCSRLL | 8 |
| 5 | PAGPMPCSRLLPSLR | 8 |
| 7 | GPMPCSRLLPSLRCS | 8 |
| 14 | LLPSLRCSLHSACCS | 8 |

[1384] TABLE XLVI

V20-HLA-DRB1-0101-
15mers-PSCA
Each peptide is a portion of SEQ
ID NO: 8; each start position is
specified, the length of peptide is
15 amino acids, and the end
position for each peptide is the
start position plus fourteen.

| | | |
|---|---|---|
| Pos | 123456789012345 | score |

| | | |
|---|---|---|
| 11 | DPASSRLWGAPLQPT | 24 |
| 15 | SRLWGAPLQPTLGVV | 18 |
| 2 | SLHSACCSGDPASSR | 16 |
| 1 | CSLHSACCSGDPASS | 14 |
| 4 | HSACCSGDPASSRLW | 14 |
| 6 | ACCSGDPASSRLWGA | 14 |
| 13 | ASSRLWGAPLQPTLG | 14 |
| 12 | PASSRLWGAPLQPTL | 12 |

[1385] TABLE XLVI

V21-HLA-DRB1-0101-1
15mers-PSCA
Each peptide is a portion of SEQ
ID NO: 8; each start position is
specified, the length of peptide is
15 amino acids, and the end
position for each peptide is the
start position plus fourteen.

| | | |
|---|---|---|
| Pos | 123456789012345 | score |

| | | |
|---|---|---|
| 1 | TLGVVPQASVPLLTD | 29 |
| 6 | PQASVPLLTDPAQWE | 23 |
| 7 | QASVPLLTDPAQWEP | 17 |
| 10 | VPLLTDPAQWEPVLV | 17 |
| 2 | LGVVPQASVPLLTDP | 16 |
| 9 | SVPLLTDPAQWEPVL | 16 |
| 13 | LTDPAQWEPVLVPEA | 15 |
| 12 | LLTDPAQWEPVLVPE | 14 |

[1386] TABLE XLVI

V21&22-HLA-DRB1-
0101-15mers-PSCA
Each peptide is a portion of SEQ
ID NO: 8; each start position is
specified, the length of peptide is
15 amino acids, and the end
position for each peptide is the
start position plus fourteen.

| | | |
|---|---|---|
| Pos | 123456789012345 | score |

| | | |
|---|---|---|
| 9 | VPLLTDLAQWEPVLV | 25 |
| 15 | LAQWEPVLVPEAHPN | 24 |
| 5 | PQASVPLLTDLAQWE | 23 |
| 12 | LTDLAQWEPVLVPEA | 23 |
| 6 | QASVPLLTDLAQWEP | 17 |
| 1 | LGVVPQASVPLLTDL | 16 |
| 8 | SVPLLTDLAQWEPVL | 16 |
| 11 | LLTDLAQWEPVLVPE | 14 |

[1387] TABLE XLVI

V22-HLA-DRB1-0101-
15mers-PSCA
Each peptide is a portion of SEQ
ID NO: 8; each start position is
specified, the length of peptide is
15 amino acids, and the end
position for each peptide is the
start position plus fourteen.

| | | |
|---|---|---|
| Pos | 123456789012345 | score |

| | | |
|---|---|---|
| 9 | VPLLTHLAQWEPVLV | 25 |
| 15 | LAQWEPVLVPEAHPN | 24 |
| 5 | PQASVPLLTHLAQWE | 23 |
| 12 | LTHLAQWEPVLVPEA | 23 |
| 6 | QASVPLLTHLAQWEP | 17 |
| 1 | LGVVPQASVPLLTHL | 16 |
| 8 | SVPLLTHLAQWEPVL | 16 |
| 11 | LLTHLAQWEPVLVPE | 14 |

[1388] TABLE XLVI

V24-HLA-DRB1-0101-
15mers-PSCA
Each peptide is a portion of SEQ
ID NO: 8; each start position is
15 amino acids, and the end
position for each peptide is the
start position plus fourteen.

| | | |
|---|---|---|
| Pos | 123456789012345 | score |

| | | |
|---|---|---|
| 14 | CTPVPHPDPPMALSR | 22 |
| 7 | ASLTMYVCTPVPHPD | 20 |
| 6 | NASLTMYVCTPVPHP | 19 |
| 9 | LTMYVCTPVPHPDPP | 19 |
| 2 | EAHPNASLTMYVCTP | 15 |
| 11 | MYVCTPVPHPDPPMA | 15 |
| 5 | PNASLTMYVCTPVPH | 14 |
| 8 | SLTMYVCTPVPHPDP | 14 |
| 10 | TMYVCTPVPHPDPPM | 14 |
| 12 | YVCTPVPHPDPPMAL | 14 |
| 15 | TPVPHPDPPMALSRT | 14 |

[1389] TABLE XLVI

V25-HLA-DRB1-0101-
15mers-PSCA
Each peptide is a portion of SEQ
ID NO: 8; each start position is
specified, the length of peptide is
15 amino acids, and the end
position for each peptide is the
start position plus fourteen.

| | | |
|---|---|---|
| Pos | 123456789012345 | score |

| | | |
|---|---|---|
| 11 | TRQISSIDTDPPADG | 28 |
| 3 | PMALSRTPTRQISSI | 23 |
| 15 | SSIDTDPPADGPSNP | 19 |
| 1 | DPPMALSRTPTRQIS | 15 |
| 8 | RTPTRQISSIDTDPP | 14 |
| 14 | ISSIDTDPPADGPSN | 14 |
| 7 | SRTPTRQISSIDTDP | 13 |

[1390] TABLE XLVI

V25&26-HLA-DRB41-
0101-15mers-PSCA
Each peptide is a portion of SEQ
ID NO: 8; each start position is
specified, the length of peptide is
15 amino acids, and the end
position for each peptide is the
start position plus fourteen.

| | | |
|---|---|---|
| Pos | 123456789012345 | score |

| | | |
|---|---|---|
| 1 | PMALSRTPTRQISSS | 23 |
| 9 | TRQISSSDTDPPADG | 22 |
| 13 | SSSDTDPPADGPSNP | 19 |
| 6 | RTPTRQISSSDTDPP | 14 |
| 5 | SRTPTRQISSSDTDP | 13 |

[1391] TABLE XLVI

V26-HLA-DRB1-0101-
15mers-PSCA
Each peptide is a portion of SEQ
ID NO: 8; each start position is
specified, the length of peptide is
15 amino acids, and the end
position for each peptide is the
start position plus fourteen.

| | | |
|---|---|---|
| Pos | 123456789012345 | score |

| | | |
|---|---|---|
| 1 | PMALSRTPTRQIGSS | 23 |
| 9 | TRQIGSSDTDPPADG | 22 |
| 13 | GSSDTDPPADGPSNP | 19 |
| 5 | SRTPTRQIGSSDTDP | 15 |
| 6 | RTPTRQIGSSDTDPP | 15 |
| 3 | ALSRTPTRQIGSSDT | 11 |

[1392] TABLE XLVI

V27-HLA-DRB1-0101-
15mers-PSCA
Each peptide is a portion of SEQ
ID NO: 8; each start position is
specified, the length of peptide is
15 amino acids, and the end
position for each peptide is the
start position plus fourteen.

| | | |
|---|---|---|
| Pos | 123456789012345 | score |

| | | |
|---|---|---|
| 1 | VVSPAPSRQQALRRA | 8 |

[1393] TABLE XLVII

V1-HLA-DRB1-0301-
15mers-PSCA
Each peptide is a portion of SEQ ID
NO: 2; each start position is
specified, the length of peptide is
15 amino acids, and the end
position for each peptide is the start
position plus fourteen.

| | | |
|---|---|---|
| Pos | 123456789012345 | score |

| | | |
|---|---|---|
| 67 | SLNCVDDSQDYYVGK | 26 |
| 106 | ILALLPALGLLLWGP | 24 |
| 2 | KAVLLALLMAGLALQ | 22 |
| 10 | MAGLALQPGTALLCY | 21 |
| 104 | AAILALLPALGLLLW | 21 |
| 66 | CSLNCVDDSQDYYVG | 19 |
| 33 | EDCLQVENCTQLGEQ | 18 |
| 56 | VGLLTVISKGCSLNC | 18 |
| 19 | TALLCYSCKAQVSNE | 17 |
| 35 | CLQVENCTQLGEQCW | 17 |
| 5 | LLALLMAGLALQPGT | 16 |
| 1 | MKAVLLALLMAGLAL | 15 |
| 103 | AAAILALLPALGLLL | 15 |
| 18 | GTALLCYSCKAQVSN | 14 |
| 25 | SCKAQVSNEDCLQVE | 14 |
| 58 | LLTVISKGCSLNCVD | 14 |
| 4 | VLLALLMAGLALQPG | 13 |
| 11 | AGLALQPGTALLCYS | 13 |
| 12 | GLALQPGTALLCYSC | 13 |
| 50 | TARIRAVGLLTVISK | 13 |
| 84 | ITCCDTDLCNASGAH | 13 |
| 107 | LALLPALGLLLWGPG | 13 |
| 3 | AVLLALLMAGLALQP | 12 |
| 6 | LALLMAGLALQPGTA | 12 |
| 28 | AQVSNEDCLQVENCT | 12 |
| 41 | CTQLGEQCWTARIRA | 12 |
| 55 | AVGLLTVISKGCSLN | 12 |
| 59 | LTVISKGCSLNCVDD | 12 |
| 81 | KKNITCCDTDLCNAS | 12 |
| 88 | DTDLCNASGAHALQP | 12 |
| 97 | AHALQPAAAILALLP | 12 |
| 102 | PAAAILALLPALGLL | 12 |
| 105 | AILALLPALGLLLWG | 12 |

[1394] TABLE XLVII

V4-HLA-DRB1-0301-
15mers-PSCA
Each peptide is a portion of SEQ
ID NO: 8; each start position is
specified, the length of peptide is
15 amino acids, and the end
position for each peptide is the
start position plus fourteen.

| | | |
|---|---|---|
| Pos | 123456789012345 | score |

| | | |
|---|---|---|
| 144 | FSTLNPVLRHLFPQE | 27 |
| 29 | CSRLPPSLRCSLHSA | 26 |
| 119 | IGSIDTDPPAOGPSN | 22 |
| 62 | TLGVVPQASVPLLTH | 21 |
| 100 | APVPHPDPPMALSRT | 21 |
| 63 | LGVVPQASVPLLTHP | 21 |
| 60 | QPTLGVVPQASVPLL | 18 |
| 162 | AHPIYDLSQVWSVVS | 18 |
| 71 | VPLLTHPAQWEPVLV | 17 |
| 149 | PVLRHLFPQEAFPAH | 17 |
| 157 | QEAFPAHPIYDLSQV | 17 |
| 83 | VLVPEAHPNASLTMY | 16 |
| 136 | CCCFHGPAFSTLNPV | 16 |
| 140 | HGPAFSTLNPVLRHL | 16 |
| 52 | YRLWGAPLQPTLGVV | 15 |
| 70 | SVPLLTHPAQWEPVL | 14 |
| 73 | LLTHPAQWEPVLVPE | 14 |
| 33 | PPSLRCSLHSACCSG | 13 |
| 56 | GAPLQPTLGVVPQAS | 13 |
| 80 | WEPVLVPEAHPNASL | 13 |
| 81 | EPVLVPEAHPNASLT | 13 |
| 82 | PVLVPEAHPNASLTM | 13 |
| 91 | NASLTMYVCAPVPHP | 13 |
| 147 | LNPVLRHLFPQEAFP | 13 |
| 161 | PAHPIYDLSQVWSVV | 13 |

[1395] TABLE XLVII

V19-HLA-DR1-0301-
15mers-PSCA
Each peptide is a portion of SEQ
ID NO: 8; each start position is
specified, the length of peptide is
15 amino acids, and the end
position for each peptide is the
start position plus fourteen.

| | | |
|---|---|---|
| Pos | 123456789012345 | score |

| | | |
|---|---|---|
| 11 | CSRLLPSLRCSLHSA | 28 |
| 15 | LPSLRCSLHSACCSG | 13 |

[1396] TABLE XLVII

V20-HLA-DR1-0301-
15mers-PSCA
Each peptide is a portion of SEQ
ID NO: 8; each start position is
specified, the length of peptide is
15 amino acids, and the end
position for each peptide is the
start position plus fourteen.

| | | |
|---|---|---|
| Pos | 123456789012345 | score |

| | | |
|---|---|---|
| 15 | SRLWGAPLQPTLGVV | 15 |
| 14 | SSRLWGAPLQPTLGV | 12 |
| 5 | SACCSGDPASSRLWG | 11 |
| 11 | DPASSRLWGAPLQPT | 9 |
| 6 | ACCSGDPASSRLWGA | 8 |
| 8 | CSGDPASSRLWGAPL | 8 |

[1397] TABLE XLVII

V21-HLA-DR1-0301-
15mers-PSCA
Each peptide is a portion of SEQ
ID NO: 8; each start position is
specified, the length of peptide is
15 amino acids, and the end
position for each peptide is the
start position plus fourteen.

| | | |
|---|---|---|
| Pos | 123456789012345 | score |

| | | |
|---|---|---|
| 9 | SVPLLTDPAQWEPVL | 24 |
| 1 | TLGVVPQASVPLLTD | 21 |
| 2 | LGVVPQASVPLLTDP | 20 |
| 10 | VPLLTDPAQWEPVLV | 17 |
| 12 | LLTDPAQWEPVLVPE | 14 |
| 7 | QASVPLLTDPAQWEP | 12 |

[1398] TABLE XLVII

V21&22-HLA-DR1-
0301-15mers-PSCA
Each peptide is a portion of SEQ
ID NO: 8; each start position is
specified, the length of peptide is
15 amino acids, and the end
position for each peptide is the
start position plus fourteen.

| | | |
|---|---|---|
| Pos | 123456789012345 | score |

| | | |
|---|---|---|
| 8 | SVPLLTDLAQWEPVL | 24 |
| 1 | LGVVPQASVPLLTDL | 20 |
| 9 | VPLLTDLAQWEPVLV | 17 |
| 11 | LLTDLAQWEPVLVPE | 16 |
| 6 | QASVPLLTDLAQWEP | 13 |
| 12 | LTDLAQWEPVLVPEA | 13 |

[1399] TABLE XLVII

V22-HLA-DR1-0301-
15mers-PSCA
Each peptide is a portion of SEQ
ID NO: 8; each start position is
specified, the length of peptide is
15 amino acids, and the end
position for each peptide is the
start position plus fourteen.

| | | |
|---|---|---|
| Pos | 123456789012345 | score |

| | | |
|---|---|---|
| 1 | LGVVPQASVPLLTHL | 20 |
| 9 | VPLLTHLAQWEPVLV | 17 |
| 11 | LLTHLAQWEPVLVPE | 16 |
| 8 | SVPLLTHLAQWEPVL | 14 |
| 6 | QASVPLLTHLAQWEP | 13 |
| 12 | LTHLAQWEPVLVPEA | 13 |
| 4 | VPQASVPLLTHLAQW | 9 |

[1400] TABLE XLVII

V24-HLA-DR1-0301-
15mers-PSCA
Each peptide is a portion of SEQ
ID NO: 8; each start position is
specified, the length of peptide is
15 amino acids, and the end
position for each peptide is the
start position plus fourteen.

| Pos | 123456789012345 | score |
|---|---|---|
| 15 | TPVPHPDPPMALSRT | 21 |
| 6 | NASLTMYVCTPVPHP | 12 |
| 8 | SLTMYVCTPVPHPDP | 11 |
| 10 | TMYVCTPVPHPDPPM | 10 |
| 14 | CTPVPHPDPPMALSR | 10 |

[1401] TABLE XLVII

V25-HLA-DR1-0301-
15mers-PSCA
Each peptide is a portion of SEQ
ID NO: 8; each start psoition is
specified, the lenght of peptide is
15 amino acids, and the end
position for each peptide is the
start position plus fourteen.

| | | |
|---|---|---|
| Pos | 123456789012345 | score |

| | | |
|---|---|---|
| 14 | ISSIDTDPPADGPSN | 22 |
| 1 | DPPMALSRTPTRQIS | 11 |
| 3 | PMALSRTPTRQISSI | 11 |
| 11 | TRQISSIDTDPPADG | 11 |
| 12 | RQISSIDTDPPADGP | 10 |
| 12 | ISSSDTDPPADGPSN | 12 |
| 1 | PMALSRTPTRQISSS | 11 |
| 9 | TRQISSSDTDPPADG | 11 |
| 10 | RQISSSDTDPPADGP | 11 |
| 2 | MALSRTPTRQISSSD | 8 |
| 3 | ALSRTPTRQISSSDT | 8 |

[1402] Table XLVII

V26-HLA-DR1-0301-
15mers-PSCA
Each peptide is a portion of SEQ
ID NO: 8; each start position is
specified, the length of peptide is
15 amino acids, and the end
position for each peptide is the
start position plus fourteen.

| | | |
|---|---|---|
| Pos | 123456789012345 | score |

| | | |
|---|---|---|
| 12 | IGSSDTDPPADGPSN | 12 |
| 1 | PMALSRTPTRQIGSS | 11 |
| 9 | TRQIGSSDTDPPADG | 11 |
| 10 | RQIGSSDTDPPADGP | 11 |
| 2 | MALSRTPTRQIGSSD | 8 |
| 3 | ALSRTPTRQIGSSDT | 8 |

[1403] TABLE XLVII

V27-HLA-DR1-0301-
15mers-PSCA
Each peptide is a portion of SEQ
ID NO: 8; each start position is
specified, the length of peptide is
15 amino acids, and the end
position for each peptide is the
start position plus fourteen.

| | | |
|---|---|---|
| Pos | 123456789012345 | score |

| | | |
|---|---|---|
| 1 | VVSPAPSRQQALRRA | 17 |
| 2 | VSPAPSRQQALRRAQ | 9 |

[1404] TABLE XLVIII

V1-HLA-DR1-0401-
15mers-PSCA
Each peptide is a portion of SEQ ID
NO: 2; each start position is
specified, the length of peptide is
15 amino acids, and the end
position for each peptide is the start
position plus fourteen.

| | | |
|---|---|---|
| Pos | 123456789012345 | score |

| | | |
|---|---|---|
| 2 | KAVLLALLMAGLALQ | 20 |
| 3 | AVLLALLMAGLALQP | 20 |
| 5 | LLALLMAGLALQPGT | 20 |
| 27 | KAQVSNEDCLQVENC | 20 |
| 33 | EDCLQVENOTQLGEQ | 20 |
| 50 | TARIRAVGLLTVISK | 20 |
| 53 | IRAVGLLTVISKGCS | 20 |
| 55 | AVGLLTVISKGCSLN | 20 |
| 56 | VGLLTVISKGCSLNC | 20 |
| 88 | DTDLCNASGAHALQP | 20 |
| 97 | AHALQPAAAILALLP | 20 |
| 104 | AAILALLPALGLLLW | 20 |
| 106 | ILALLPALGLLLWGP | 20 |
| 8 | LLMAGLALQPGTALL | 18 |
| 32 | NEDCLQVENCTQLGE | 18 |
| 52 | RIRAVGLLTVISKGC | 18 |
| 93 | NASGAHALQPAAAIL | 18 |
| 21 | LLCYSCKAQVSNEDC | 17 |
| 74 | SQDYYVGKKNITCCD | 16 |
| 1 | MKAVLLALLMAGLAL | 14 |
| 7 | ALLMAGLALQPGTAL | 14 |
| 10 | MAGLALQPGTALLCY | 14 |
| 18 | GTALLCYSCKAQVSN | 14 |
| 19 | TALLCYSCKAQVSNE | 14 |
| 35 | CLQVENCTQLGEQCW | 14 |
| 59 | LTVISKGCSLNCVDD | 14 |
| 65 | GCSLNCVDDSQDYYV | 14 |
| 68 | LNCVDDSQDYYVGKK | 14 |
| 81 | KKNITCCDTDLCNAS | 14 |
| 103 | AAAILALLPALGLLL | 14 |
| 107 | LALLPALGLLLWGPG | 14 |
| 9 | LMAGLALQPGTALLC | 12 |
| 11 | AGLALQPGTALLCYS | 12 |
| 14 | ALQPGTALLCYSCKA | 12 |
| 16 | QPGTALLCYSCKAQV | 12 |
| 17 | PGTALLCYSCKAQVS | 12 |
| 24 | YSCKAQVSNEDCLQV | 12 |
| 29 | QVSNEDCLQVENCTQ | 12 |
| 39 | ENCTQLGEQCWTARI | 12 |
| 40 | NCTQLGEQCWTARIR | 12 |
| 42 | TQLGEQCWTARIRAV | 12 |
| 44 | LGEQCWTARIRAVGL | 12 |
| 45 | GEQCWTARIRAVGLL | 12 |
| 47 | QCWTARIRAVGLLTV | 12 |
| 49 | WTARIRAVGLLTVIS | 12 |
| 66 | CSLNCVDDSQDYYVG | 12 |
| 67 | SLNCVDDSQDYYVGK | 12 |
| 70 | CVDDSQDYYVGKKNI | 12 |
| 73 | DSQDYYVGKKNITCC | 12 |
| 78 | YVGKKNITCCDTDLC | 12 |
| 82 | KNITCCDTDLCNASG | 12 |
| 84 | ITCCDTDLCNASGAH | 12 |
| 85 | TCCDTDLCNASGAHA | 12 |
| 90 | DLCNASGAHALQPAA | 12 |
| 94 | ASGAHALQPAAAILA | 12 |
| 98 | HALQPAAAILALLPA | 12 |
| 99 | ALQPAAAILALLPAL | 12 |
| 101 | QPAAAILALLPALGL | 12 |
| 102 | PAAAILALLPALGLL | 12 |
| 46 | EQCWTARIRAVGLLT | 11 |
| 75 | QDYYVGKKNITCCDT | 11 |
| 58 | LLTVISKGCSLNCVD | 9 |

[1405] TABLE XLVIII

V4-HLA-DR1-0401-15mers-PSCA
Each peptide is a portion of SEQ ID NO: 8;
each start position is specified, the
length of peptide is 15 amino acids, and
the end position for each peptide is the
start position plus fourteen.

| | | |
|---|---|---|
| Pos | 123456789012345 | score |

| | | |
|---|---|---|
| 60 | QPTLGVVPQASVPLL | 26 |
| 68 | QASVPLLTHPAQWEP | 26 |
| 81 | EPVLVPEAHPNASLT | 26 |
| 162 | AHPIYDLSQVWSVVS | 26 |
| 165 | IYDLSQVWSVVSPAP | 26 |
| 172 | WSWSPAPSRGQALRI | 26 |
| 52 | YRLWGAPLQPTLGVV | 22 |
| 77 | PAQWEPVLVPEAHPN | 22 |
| 169 | SQVWSVVSPAPSRGQ | 22 |
| 29 | CSRLPPSLRCSLHSA | 20 |
| 51 | SYRLWGAPLQPTLGV | 20 |
| 62 | TLGVVPQASVPLLTH | 20 |
| 63 | LGVVPQASVPLLTHP | 20 |
| 82 | PVLVPEAHPNASLTM | 20 |
| 108 | PMALSRTPTRQIGSI | 20 |
| 116 | TRQIGSIDTDPPADG | 20 |
| 132 | SNPLCCCFHGPAFST | 20 |
| 144 | FSTLNPVLRHLFPQE | 20 |
| 148 | NPVLRHLFPQEAFPA | 20 |
| 168 | LSQVWSVVSPAPSRG | 20 |
| 67 | PQASVPLLTHPAQWE | 18 |
| 105 | PDPPMALSRTPTRQI | 18 |
| 113 | RTPTRQIGSIDTDPP | 18 |
| 137 | CCFHGPAFSTLNPVL | 18 |
| 5 | TTTWARRTSRAVTPT | 17 |
| 49 | PASYRLWGAPLQPTL | 16 |
| 94 | LTMYVCAPVPHPDPP | 16 |
| 136 | CCCFHGPAFSTLNPV | 16 |
| 141 | GPAFSTLNPVLRHLF | 16 |
| 152 | RHLFPQEAFPAHPIY | 16 |
| 157 | QEAFPAHPIYDLSQV | 16 |
| 163 | HPIYDLSQVWSVVSP | 16 |
| 13 | SRAVTPTCATPAGPM | 14 |
| 24 | AGPMPCSRLPPSLRC | 14 |
| 3 | PPSLRCSLHSACCSG | 14 |
| 37 | RCSLHSACCSGDPAS | 14 |
| 71 | VPLLTHPAQWEPVLV | 14 |
| 80 | WEPVLVPEAHPNASL | 14 |
| 91 | NASLTMYVCAPVPHP | 14 |
| 99 | CAPVPHPDPPMALSR | 14 |
| 106 | DPPMALSRTPTRQIG | 14 |
| 119 | IGSIDTDPPADGPSN | 14 |
| 151 | LRHLFPQEAFPAHPI | 14 |
| 2 | THRTTTWARRTSRAV | 12 |
| 3 | HRTTTWARRTSRAVT | 12 |
| 6 | TTWARRTSRAVTPTC | 12 |
| 9 | ARRTSRAVTPTCATP | 12 |
| 10 | RRTSRAVTPTCATPA | 12 |
| 11 | RTSRAVTPTCATPAG | 12 |
| 34 | PSLRCSLHSACCSGD | 12 |
| 43 | ACCSGDPASYRLWGA | 12 |
| 48 | DPASYRLWGAPLQPT | 12 |
| 54 | LWGAPLQPTLGVVPQ | 12 |
| 57 | APLQPTLGVVPQASV | 12 |
| 59 | LQPTLGVVPQASVPL | 12 |
| 72 | PLLTHPAQWEPVLVP | 12 |
| 83 | VLVPEAHPNASLTMY | 12 |
| 85 | VPEAHPNASLTMYVC | 12 |
| 87 | EAHPNASLTMYVCAP | 12 |
| 96 | MYVCAPVPHPDPPMA | 12 |
| 100 | APVPHPDPPMALSRT | 12 |
| 104 | HPDPPMALSRTPTRQ | 12 |
| 110 | ALSRTPTRQIGSIDT | 12 |
| 117 | RQIGSIDTDPPADGP | 12 |
| 122 | IDTDPPADGPSNPLC | 12 |
| 124 | TDPPADGPSNPLCCC | 12 |
| 138 | CFHGPAFSTLNPVLR | 12 |
| 140 | HGPAFSTLNPVLRHL | 12 |
| 145 | STLNPVLRHLFPQEA | 12 |
| 149 | PVLRHLFPQEAFPAH | 12 |
| 154 | LFPQEAFPAHPIYDL | 12 |
| 159 | AFPAHPIYDLSQVWS | 12 |
| 161 | PAHPIYDLSQVWSVV | 12 |
| 173 | SVVSPAPSRGQALRR | 12 |

[1406] TABLE XLVIII

V19-HLA-DR1-0401-15mers-PSCA
Each peptide is a portion of SEQ ID NO: 8;
each start position is specified, the
length of peptide is 15 amino acids, and
the end position for each peptide is the
start position plus fourteen.

| | | |
|---|---|---|
| Pos | 123456789012345 | score |

| | | |
|---|---|---|
| 11 | CSRLLPSLRCSLHSA | 20 |
| 6 | AGPMPCSRLLPSLRC | 14 |
| 12 | SRLLPSLRCSLHSAC | 14 |
| 15 | LPSLRCSLHSACCSG | 14 |
| 4 | TPAGPMPCSRLLPSL | 12 |
| 9 | MPCSRLLPSLRCSLH | 12 |

[1407] TABLE XLVIII

V20-HLA-DR1-0401-15mers-PSCA
Each peptide is a portion of SEQ ID NO: 8;
each start position is specified, the
length of peptide is 15 amino acids, and
the end position for each peptide is the
start position plus fourteen.

| | | |
|---|---|---|
| Pos | 123456789012345 | score |

| | | |
|---|---|---|
| 15 | SRLWGAPLQPTLGVV | 22 |
| 14 | SSRLWGAPLQPTLGV | 20 |
| 6 | ACCSGDPASSRLWGA | 12 |
| 7 | CCSGDPASSRLWGAP | 12 |
| 11 | DPASSRLWGAPLQPT | 12 |

[1408] TABLE XLVIII

V21-HLA-DR1-0401-15mers-PSCA
Each peptide is a portion of SEQ ID NO: 8;
each start position is specified, the
length of peptide is 15 amino acids, and
the end position for each peptide is the
start position plus fourteen.

| | | |
|---|---|---|
| Pos | 123456789012345 | score |

| | | |
|---|---|---|
| 1 | TLGVVPQASVPLLTD | 20 |
| 2 | LGVVPQASVPLLTDP | 20 |
| 7 | QASVPLLTDPAQWEP | 20 |
| 6 | PQASVPLLTDPAQWE | 18 |
| 9 | SVPLLTDPAQWEPVL | 14 |
| 10 | VPLLTDPAQWEPVLV | 14 |
| 11 | PLLTDPAQWEPVLVP | 12 |

[1409] TABLE XLVIII

V21 & 22-HLA-DR1-0401-15mers-PSCA
Each peptide is a portion of SEQ ID NO: 8;
each start position is specified, the
length of peptide is 15 amino acids, and
the end position for each peptide is the
start position plus fourteen.

| | | |
|---|---|---|
| Pos | 123456789012345 | score |

| | | |
|---|---|---|
| 1 | LGVVPQASVPLLTDL | 20 |
| 6 | QASVPLLTDLAQWEP | 20 |
| 9 | VPLLTDLAQWEPVLV | 20 |
| 5 | PQASVPLLTDLAQWE | 18 |
| 8 | SVPLLTDLAQWEPVL | 14 |
| 12 | LTDLAQWEPVLVPEA | 14 |
| 10 | PLLTDLAQWEPVLVP | 12 |

[1410] TABLE XLVIII

V22-HLA-DR1-0401-15mers-PSCA
Each peptide is a portion of SEQ ID NO: 8;
each start position is specified, the
length of peptide is 15 amino acids, and
the end position for each peptide is the
start position plus fourteen.

| | | |
|---|---|---|
| Pos | 123456789012345 | score |

| | | |
|---|---|---|
| 6 | QASVPLLTHLAQWEP | 26 |
| 15 | LAQWEPVLVPEAHPN | 22 |
| 1 | LGVVPQASVPLLTHL | 20 |
| 9 | VPLLTHLAQWEPVLV | 20 |
| 5 | PQASVPLLTHLAQWE | 18 |
| 12 | LTHLAQWEPVLVPEA | 14 |
| 10 | PLLTHLAQWEPVLVP | 12 |

[1411] TABLE XLVIII

V24-HLA-DR1-0401-15mers-PSCA
Each peptide is a portion of SEQ ID NO: 8;
each start position is specified, the
length of peptide is 15 amino acids, and
the end position for each peptide is the
start position plus fourteen.

| | | |
|---|---|---|
| Pos | 123456789012345 | score |

| | | |
|---|---|---|
| 6 | NASLTMYVCTPVPHP | 14 |
| 14 | CTPVPHPDPPMALSR | 14 |
| 2 | EAHPNASLTMYVCTP | 12 |
| 7 | ASLTMYVCTPVPHPD | 12 |

[1412] TABLE XLVIII

V25-HLA-DR1-0401-15mers-PSCA
Each peptide is a portion of SEQ ID NO: 8;
each start position is specified, the
length of peptide is 15 amino acids, and
the end position for each peptide is the
start position plus fourteen.

| | | |
|---|---|---|
| Pos | 123456789012345 | score |

| | | |
|---|---|---|
| 3 | PMALSRTPTRQISSI | 20 |
| 11 | TRQISSIDTDPPADG | 20 |
| 8 | RTPTRQISSIDTDPP | 18 |
| 1 | DPPMALSRTPTRQIS | 14 |
| 14 | ISSIDTDPPADGPSN | 14 |
| 4 | MALSRTPTRQISSID | 12 |
| 5 | ALSRTPTRQISSIDT | 12 |
| 12 | RQISSIDTDPPADGP | 12 |

[1413] TABLE XLVIII

V25 & 26-HLA-DR1-0401-15mers-PSCA
Each peptide is a portion of SEQ ID NO: 8;
each start position is specified, the
length of peptide is 15 amino acids, and
the end position for each peptide is the
start position plus fourteen.

| | | |
|---|---|---|
| Pos | 123456789012345 | score |

| | | |
|---|---|---|
| 1 | PMALSRTPTRQISSS | 20 |
| 6 | RTPTRQISSSDTDPP | 18 |
| 9 | TRQISSSDTDPPADG | 14 |
| 2 | MALSRTPTRQISSSD | 12 |
| 3 | ALSRTPTRQISSSDT | 12 |
| 10 | RQISSSDTDPPADGP | 12 |

[1414] TABLE XLVIII

V26-HLA-DR1-0401-15mers-PSCA
Each peptide is a portion of SEQ ID NO: 8;
each start position is specified, the
length of peptide is 15 amino acids, and
the end position for each peptide is the
start position plus fourteen.

| | | |
|---|---|---|
| Pos | 123456789012345 | score |

| | | |
|---|---|---|
| 1 | PMALSRTPTRQIGSS | 20 |
| 6 | RTPTRQIGSSDTDPP | 18 |
| 9 | TRQIGSSDTDPPADG | 14 |
| 3 | ALSRTPTRQIGSSDT | 12 |
| 10 | RQIGSSDTDPPADGP | 12 |
| 15 | SDTDPPADGPSNPLC | 12 |

[1415] TABLE XLVIII

V27-HLA-DR1-0401-15mers-PSCA
Each peptide is a portion of SEQ ID NO: 8;
each start position is specified, the
length of peptide is 15 amino acids, and
the end position for each peptide is the
start position plus fourteen.

| Pos | 123456789012345 | score |
|---|---|---|
| 1 | VVSPAPSRQQALRRA | 12 |

[1416] TABLE XLIX

V1-HLA-DRB1-1101-15mers-PSCA
Each peptide is a portion of SEQ ID NO: 2;
each start position is specified, the
length of peptide is 15 amino acids, and
the end position for each peptide is the
start position plus fourteen.

| | | |
|---|---|---|
| Pos | 123456789012345 | score |

| | | |
|---|---|---|
| 56 | VGLLTVISKGCSLNC | 29 |
| 46 | EQCWTARIRAVGLLT | 27 |
| 74 | SQDYYVGKKNITCCD | 20 |
| 3 | AVLLALLMAGLALQP | 19 |
| 103 | AAAILALLPALGLLL | 19 |
| 7 | ALLMAGLALQPGTAL | 18 |
| 44 | LGEQCWTARIRAVGL | 16 |
| 19 | TALLCYSCKAQVSNE | 14 |
| 73 | DSQDYYVGKKNITCC | 14 |
| 85 | TCCDTDLCNASGAHA | 14 |

[1417] TABLE XLIX

V4-HLA-DRB1-1101-15mers-PSCA
Each peptide is a portion of SEQ ID NO: 8;
each start position is specified, the
length of peptide is 15 amino acids, and
the end position for each peptide is the
start position plus fourteen.

| | | |
|---|---|---|
| Pos | 123456789012345 | score |

| | | |
|---|---|---|
| 169 | SQVWSVVSPAPSRGQ | 23 |
| 77 | PAQWEPVLVPEAHPN | 22 |
| 144 | FSTLNPVLRHLFPQE | 21 |
| 145 | STLNPVLRHLFPQEA | 21 |
| 68 | QASVPLLTHPAQWEP | 20 |
| 81 | EPVLVPEAHPNASLT | 20 |
| 96 | MYVCAPVPHPDPPMA | 20 |
| 132 | SNPLCCCFHGPAFST | 20 |
| 168 | LSQVWSVVSPAPSRG | 20 |
| 165 | IYDLSQVWSVVSPAP | 19 |
| 116 | TRQIGSIDTDPPADG | 18 |
| 148 | NPVLRHLFPQEAFPA | 18 |
| 162 | AHPIYDLSQVWSVVS | 18 |
| 2 | THRTTTWARRTSRAV | 17 |
| 141 | GPAFSTLNPVLRHLF | 17 |
| 94 | LTMYVCAPVPHPDPP | 16 |
| 109 | MALSRTPTRQIGSID | 15 |
| 13 | SRAVTPTCATPAGPM | 14 |
| 23 | PAGPMPCSRLPPSLR | 14 |
| 29 | CSRLPPSLRCSLHSA | 14 |
| 33 | PPSLRCSLHSACCSG | 14 |
| 45 | CSGDPASYRLWGAPL | 14 |
| 59 | LQPTLGVVPQASVPL | 14 |
| 71 | VPLLTHPAQWEPVLV | 14 |
| 105 | PDPPMALSRTPTRQI | 14 |
| 171 | VWSVVSPAPSRGQAL | 14 |
| 173 | SVVSPAPSRGQALRR | 14 |
| 53 | RLWGAPLQPTLGVVP | 13 |
| 56 | GAPLQPTLGVVPQAS | 13 |
| 60 | QPTLGVVPQASVPLL | 13 |
| 92 | ASLTMYVCAPVPHPD | 13 |
| 151 | LRHLFPQEAFPAHPI | 13 |
| 10 | RRTSRAVTPTCATPA | 12 |
| 24 | AGPMPCSRLPPSLRC | 12 |
| 67 | PQASVPLLTHPAQWE | 12 |
| 79 | QWEPVLVPEAHPNAS | 12 |
| 82 | PVLVPEAHPNASLTM | 12 |
| 90 | PNASLTMYVCAPVPH | 12 |
| 99 | PNASLTMYVCAPVPH | 12 |
| 119 | IGSIDTDPPADGPSN | 12 |
| 5 | TTTWARRTSRAVTPT | 11 |
| 49 | PASYRLWGAPLQPTL | 11 |

[1418] TABLE XLIX

V19-HLA-DRB1-1101-
15mers-PSCA
Each peptide is a portion of SEQ
ID NO: 8; each start position is
specified, the length of peptide is
15 amino acids, and the end
position for each peptide is the
start position plus fourteen.

| | | |
|---|---|---|
| Pos | 123456789012345 | score |

| | | |
|---|---|---|
| 5 | PAGPMPCSRLLPSLR | 15 |
| 11 | CSRLLPSLRCSLHSA | 14 |
| 15 | LPSLRCSLHSACCSG | 13 |
| 12 | SRLLPSLRCSLHSAC | 12 |
| 6 | AGPMPCSRLLPSLRC | 8 |
| 3 | ATPAGPMPCSRLLPS | 8 |
| 9 | MPCSRLLPSLRCSLH | 8 |
| 8 | PMPCSRLLPSLRCSL | 7 |
| 10 | PCSRLLPSLRCSLHS | 7 |

[1419] TABLE XLIX

V20-HLA-DRB1-1101-15mers-PSCA
Each peptide is a portion of SEQ ID NO: 8;
each start position is specified, the
length of peptide is 15 amino acids, and
the end position for each peptide is the
start position plus fourteen.

| | | |
|---|---|---|
| Pos | 123456789012345 | score |

| | | |
|---|---|---|
| 8 | CSGDPASSRLWGAPL | 14 |
| 15 | SRLWGAPLQPTLGVV | 10 |
| 1 | CSLHSACCSGDPASS | 6 |
| 2 | SLHSACCSGDPASSR | 6 |
| 3 | LHSACCSGDPASSRL | 6 |
| 4 | HSACCSGDPASSRLW | 6 |
| 9 | SGDPASSRLWGAPLQ | 6 |
| 10 | GDPASSRLWGAPLQP | 6 |
| 11 | DPASSRLWGAPLQPT | 6 |
| 13 | ASSRLWGAPLQPTLG | 6 |
| 14 | SSRLWGAPLQPTLGV | 6 |
| 10 | VPLLTDPAQWEPVLV | 14 |
| 6 | PQASVPLLTDPAQWE | 12 |
| 7 | QASVPLLTDPAQWEP | 12 |
| 2 | LGVVPQASVPLLTDP | 7 |
| 5 | VPQASVPLLTDPAQW | 7 |
| 14 | TDPAQWEPVLVPEAH | 7 |
| 1 | TLGVVPQASVPLLTD | 6 |
| 4 | VVPQASVPLLTDPAQ | 6 |
| 9 | SVPLLTDPAQWEPVL | 6 |

[1420] TABLE XLIX

V21 & 22-HLA-DRB1-1101-15mers-PSCA
Each peptide is a portion of SEQ ID NO: 8;
each start position is specified, the
length of peptide is 15 amino acids, and
the end position for each peptide is the
start position plus fourteen.

| | | |
|---|---|---|
| Pos | 123456789012345 | score |

| | | |
|---|---|---|
| 9 | VPLLTDLAQWEPVLV | 20 |
| 5 | PQASVPLLTDLAQWE | 13 |
| 6 | QASVPLLTDLAQWEP | 12 |

[1421] TABLE XLIX

V22-HLA-DRB1-1101-15mers-PSCA
Each peptide is a portion of SEQ ID NO: 8;
each start position is specified, the
length of peptide is 15 amino acids, and
the end position for each peptide is the
start position plus fourteen.

| | | |
|---|---|---|
| Pos | 123456789012345 | score |

| | | |
|---|---|---|
| 15 | LAQWEPVLVPEAHPN | 22 |
| 6 | QASVPLLTHLAQWEP | 20 |
| 9 | VPLLTHLAQWEPVLV | 20 |
| 5 | PQASVPLLTHLAQWE | 13 |

[1422] TABLE XLIX

V24-HLA-DRB1-1101-15mers-PSCA
Each peptide is a portion of SEQ ID NO: 8;
each start position is specified, the
length of peptide is 15 amino acids, and
the end position for each peptide is the
start position plus fourteen.

| | | |
|---|---|---|
| Pos | 123456789012345 | score |

| | | |
|---|---|---|
| 15 | MYVCTPVPHPDPPMA | 22 |
| 9 | LTMYVCTPVPHPDPP | 16 |
| 7 | ASLTMYVCTPVPHPD | 13 |
| 5 | PNASLTMYVCTPVPH | 12 |
| 14 | CTPVPHPDPPMALSR | 12 |
| 6 | NASLTMYVCTPVPHP | 10 |

[1423] TABLE XLIX

V25-HLA-DRB1-1101-15mers-PSCA
Each peptide is a portion of SEQ ID NO: 8;
each start position is specified, the
length of peptide is 15 amino acids, and
the end position for each peptide is the
start position plus fourteen.

| | | |
|---|---|---|
| Pos | 123456789012345 | score |

| | | |
|---|---|---|
| 11 | TRQISSIDTDPPADG | 18 |
| 4 | MALSRTPTRQISSID | 15 |
| 14 | ISSIDTDPPADGPSN | 12 |
| 5 | ALSRTPTRQISSIDT | 81 |
| 15 | SSIDTDPPADGPSNP | 8 |

[1424] TABLE XLIX

V25 & 26-HLA-DRB1-1101-15mers-PSCA
Each peptide is a portion of SEQ ID NO: 8;
each start position is specified, the
length of peptide is 15 amino acids, and
the end position for each peptide is the
start position plus fourteen.

| | | |
|---|---|---|
| Pos | 123456789012345 | score |

| | | |
|---|---|---|
| 2 | MALSRTPTRQISSSD | 15 |
| 9 | TRQISSSDTDPPADG | 12 |
| 3 | ALSRTPTRQISSSDT | 8 |
| 13 | SSSDTDPPADGPSNP | 8 |
| 1 | PMALSRTPTRQISSS | 7 |

[1425] TABLE L
Protein Characteristics of PSCA v.4

| | Bioinformatic | | |
|---|---|---|---|
| | Program | URL | Outcome |
| PSCA v.4 | | | |
| ORF | ORF finder | | 570 bp |
| Protein length | | | 189 aa |
| Transmembrane region | TM Pred | http://www.ch.embnet.org/ | no TM |
| | HMMTop | http://www.enzim.hu/hmmtop/ | no TM |
| | Sosui | http://www.genome.ad.jp/SOSui/ | soluble |
| | TMHMM | http://www.cbs.dtu.dk/services/TMHMM | no TM |
| Signal Peptide | Signal P | http://www.cbs.dtu.dk/services/SignalP/ | none |
| pI | pI/MW tool | http://www.expasy.ch/tools/ | pI 8.87 |
| Molecular weight | pI/MW tool | http://www.expasy.ch/tools/ | 20.3 kDa |
| Localization | PSORT | http://psort.nibb.ac.jp/ | 90% mitochondria |
| | PSORT II | http://psort.nibb.ac.jp/ | 78% mitochondria |
| Motifs | Pfam | http://www.sanger.ac.uk/Pfam/ | no motif |
| | Prints | http://www.biochem.ucl.ac.uk/ | cadherin signature |
| | Blocks | http://www.blocks.fhcrc.org/ | Granulin |
| PSCA v.1 | | | |
| ORF | ORF finder | | 372 bp |
| Protein length | | | 123 aa |
| Transmembrane region | TM Pred | http://www.ch.embnet.org/ | 1 TM, aa 99-118 |
| | HMMTop | http://www.enzim.hu/hmmtop/ | 1 TM, aa 103-121 |
| | Sosui | http://www.genome.ad.jp/SOSui/ | membrane protein aa 100-122 |
| | TMHMM | http://www.cbs.dtu.dk/services/TMHMM | no TM |
| Signal Peptide | Signal P | http://www.cbs.dtu.dk/services/SignalP/ | yes, aa 1-15 |
| pI | pI/MW tool | http://www.expasy.ch/tools/ | pI 5.01 |
| Molecular weight | pI/MW tool | http://www.expasy.ch/tools/ | 12.9 kDa |
| Localization | PSORT | http://psort.nibb.ac.jp/ | 91% plasma membrane |
| | PSORT II | http://psort.nibb.ac.jp/ | 34% plasma membrane, 34% |
| | | | extracellular |
| Motifs | Pfam | http://www.sanger.ac.uk/Pfam/ | uPAR, Ly-6 |
| | Prints | http://www.biochem.ucl.ac.uk/ | no motif |
| | Blocks | http://www.blocks.fhcrc.org/ | Ly-6 |

[1426] TABLE LI
Exon boundaries of transcript PSCA v.1

| Exon Number | Start | End | Length |
|---|---|---|---|
| 1 | 10 | 69 | 60 |
| 2 | 70 | 177 | 108 |
| 3 | 178 | 985 | 808 |

[1427] TABLE LII(a)
Nucleotide sequence of transcript variant PSCA v.2 (SEQ ID NO:6527

| | | | | | | |
|---|---|---|---|---|---|---|
| tttgaggcca | tataaagtca | cctgaggccc | tctccaccac | agcccaccag | tgaccatgaa | 60 |
| ggctgtgctg | cttgccctgt | tgatggcagg | cttggccctg | cagccaggca | ctgccctgct | 120 |
| gtgctactcc | tgcaaagccc | aggtgagcaa | cgaggactgc | ctgcaggtgg | agaactgcac | 180 |
| ccagctgggg | gagcagtgct | ggaccgcgcg | catccgcgca | gttggcctcc | tgaccgtcat | 240 |
| cagcaaaggc | tgcagcttga | actgcgtgga | tgactcacag | gactactacg | tgggcaagaa | 300 |
| gaacatcacg | tgctgtgaca | ccgacttgtg | caacgccagc | ggggcccatg | ccctgcagcc | 360 |
| ggctgccgcc | atccttgcgc | tgctccctgc | actcggcctg | ctgctctggg | gacccggcca | 420 |
| gctataggct | ctggggggcc | ccgctgcagc | ccacactggg | tgtggtgccc | caggcctctg | 480 |
| tgccactcct | cacacacccg | gcccagtggg | agcctgtcct | ggttcctgag | gcacatccta | 540 |
| acgcaagtct | gaccatgtat | gtctgcgccc | ctgtccccca | ccctgaccct | cccatggccc | 600 |
| tctccaggac | tcccacccgg | cagatcggct | ctattgacac | agatccgcct | gcagatggcc | 660 |
| cctccaaccc | tctctgctgc | tgtttccatg | gcccagcatt | ctccaccctt | aaccctgtgc | 720 |
| tcaggcacct | cttcccccag | gaagccttcc | ctgcccaccc | catctatgac | ttgagccagg | 780 |
| tctggtccgt | ggtgtccccc | gcacccagca | ggggacaggc | actcaggagg | gcccggtaaa | 840 |
| ggctgagatg | aagtggactg | agtagaactg | gaggacagga | gtcgacgtga | gttcctggga | 900 |
| gtctccagag | atggggcctg | gaggcctgga | ggaaggggcc | aggcctcaca | ttcgtggggc | 960 |
| tccctgaatg | gcagcctcag | cacagcgtag | gcccttaata | aacacctgtt | ggataagcca | 1020 |

[1428] TABLE LIII(a)

Nucleotide sequence alignment of PSCA v.2
(SEQ ID NO:6528) and PSCA v.1 (SEQ ID NO:6529)

| | | | |
|---|---|---|---|
| v.2 | 16 | agtcacctgaggccctctccaccacagcccaccagtgaccatgaaggctg | 65 |
| | | \|\|..\| \|\|\|\| \|\|\|\|\|\|\|\|\|\|\|\|\|\|\|\|\|\| | |
| v.1 | 1 | aggga---gagg--------------------cagtgaccatgaaggctg | 27 |
| v.2 | 66 | tgctgcttgccctgttgatggcaggcttggccctgcagccaggcactgcc | 115 |
| | | \|\|\|\|\|\|\|\|\|\|\|\|\|\|\|\|\|\|\|\|\|\|\|\|\|\|\|\|\|\|\|\|\|\|\|\|\|\|\|\|\|\|\|\|\|\|\|\|\|\| | |
| v.1 | 28 | tgctgcttgccctgttgatggcaggcttggccctgcagccaggcactgcc | 77 |
| v.2 | 116 | ctgctgtgctactcctgcaaagcccaggtgagcaacgaggactgcctgca | 165 |
| | | \|\|\|\|\|\|\|\|\|\|\|\|\|\|\|\|\|\|\|\|\|\|\|\|\|\|\|\|\|\|\|\|\|\|\|\|\|\|\|\|\|\|\|\|\|\|\|\|\|\| | |
| v.1 | 78 | ctgctgtgctactcctgcaaagcccaggtgagcaacgaggactgcctgca | 127 |
| v.2 | 166 | ggtggagaactgcacccagctgggggagcagtgctggaccgcgcgcatcc | 215 |
| | | \|\|\|\|\|\|\|\|\|\|\|\|\|\|\|\|\|\|\|\|\|\|\|\|\|\|\|\|\|\|\|\|\|\|\|\|\|\|\|\|\|\|\|\|\|\|\|\|\|\| | |
| v.1 | 128 | ggtggagaactgcacccagctgggggagcagtgctggaccgcgcgcatcc | 177 |
| v.2 | 216 | gcgcagttggcctcctgaccgtcatcagcaaaggctgcagcttgaactgc | 265 |
| | | \|\|\|\|\|\|\|\|\|\|\|\|\|\|\|\|\|\|\|\|\|\|\|\|\|\|\|\|\|\|\|\|\|\|\|\|\|\|\|\|\|\|\|\|\|\|\|\|\|\| | |
| v.1 | 178 | gcgcagttggcctcctgaccgtcatcagcaaaggctgcagcttgaactgc | 227 |
| v.2 | 266 | gtggatgactcacaggactactacgtgggcaagaagaacatcacgtgctg | 315 |
| | | \|\|\|\|\|\|\|\|\|\|\|\|\|\|\|\|\|\|\|\|\|\|\|\|\|\|\|\|\|\|\|\|\|\|\|\|\|\|\|\|\|\|\|\|\|\|\|\|\|\| | |
| v.1 | 228 | gtggatgactcacaggactactacgtgggcaagaagaacatcacgtgctg | 277 |
| v.2 | 316 | tgacaccgacttgtgcaacgccagcggggcccatgccctgcagccggctg | 365 |
| | | \|\|\|\|\|\|\|\|\|\|\|\|\|\|\|\|\|\|\|\|\|\|\|\|\|\|\|\|\|\|\|\|\|\|\|\|\|\|\|\|\|\|\|\|\|\|\|\|\|\| | |
| v.1 | 278 | tgacaccgacttgtgcaacgccagcggggcccatgccctgcagccggctg | 327 |
| v.2 | 366 | ccgccatccttgcgctgctccctgcactcggcctgctgctctggggaccc | 415 |
| | | \|\|\|\|\|\|\|\|\|\|\|\|\|\|\|\|\|\|\|\|\|\|\|\|\|\|\|\|\|\|\|\|\|\|\|\|\|\|\|\|\|\|\|\|\|\|\|\|\|\| | |
| v.1 | 328 | ccgccatccttgcgctgctccctgcactcggcctgctgctctggggaccc | 377 |
| v.2 | 416 | ggccagctataggctctggggggccccgctgcagcccacactgggtgtgg | 465 |
| | | \|\|\|\|\|\|\|\|\|\|\|\|\|\|\|\|\|\|\|\|\|\|\|\|\|\|\|\|\|\|\|\|\|\|\|\|\|\|\|\|\|\|\|\|\|\|\|\|\|\| | |
| v.1 | 378 | ggccagctataggctctggggggccccgctgcagcccacactgggtgtgg | 427 |
| v.2 | 466 | tgccccaggcctctgtgccactcctcaca-cacccggcccagtgggagcc | 514 |
| | | \|\|\|\|\|\|\|\|\|\|\|\|\|.\|\|\|\|\|\|\|\|\|\|\|\|\|\|\|\| .\|\|\|.\|\|\|\|\|\|\|\|\|\|\|\|\|\|\| | |
| v.1 | 428 | tgccccaggcctttgtgccactcctcacagaacctggcccagtgggagcc | 477 |
| v.2 | 515 | tgtcctggttcctgaggcacatcctaacgcaagtctgaccatgtatgtct | 564 |
| | | \|\|\|\|\|\|\|\|\|\|\|\|\|\|\|\|\|\|\|\|\|\|\|\|\|\|\|\|\|\|\|\|\|\|.\|\|\|\|\|\|\|\|\|\|\|\|\|.\| | |
| v.1 | 478 | tgtcctggttcctgaggcacatcctaacgcaagtttgaccatgtatgttt | 527 |
| v.2 | 565 | gcgcccctgtccccc--accctgaccctcccat-ggccctctccaggact | 611 |
| | | \|\|.\|\|\|\|\|.\|.\|\|\|\| \|\|\|\|\|\|\|\|\|.\|\|\|\|\|\| \|\|\|\|.\|.\|\|\|\|\|\|\|.\| | |
| v.1 | 528 | gcaccccttttccccnaaccctgaccttcccatgggccttttccaggatt | 577 |
| v.2 | 612 | cccacccggcagatcggctctattgacacagatccgcctgcagatggccc | 661 |
| | | \|\|\|\|\|\|\|\|\|\|\|\|\|\|\|.\|.\|.\|\|.\|\|\|\|\|\|\|\|\|\|\|\|\|\|\|\|\|\|\|\|\|\|\|\|\|\|\| | |
| v.1 | 578 | cccacccggcagatcagttttagtgacacagatccgcctgcagatggccc | 627 |
| v.2 | 662 | ctccaaccctctctgctgctgtttccatggcccagcattctccaccctta | 711 |
| | | \|\|\|\|\|\|\|\|\|\|.\|\|\|\|.\|\|\|\|\|\|\|\|\|\|\|\|\|\|\|\|\|\|\|\|\|\|\|.\|\|\|\|\|\|\|\|\|\| | |
| v.1 | 628 | ctccaaccctttctgttgctgtttccatggcccagcattttccaccctta | 677 |
| v.2 | 712 | accctgtgctcaggcacctcttcccccaggaagccttccctgcccacccc | 761 |
| | | \|\|\|\|\|\|\|\|.\|\|\|\|\|\|\|\|.\|\|\|\|\|\|\|\|\|\|\|\|\|\|\|\|\|\|\|\|\|\|\|\|\|\|\|\|\|\|\|\|\| | |
| v.1 | 678 | accctgtgttcaggcacttcttcccccaggaagccttccctgcccacccc | 727 |
| v.2 | 762 | atctatgacttgagccaggtctggtccgtggtgtcccccgcacccagcag | 811 |
| | | \|\|.\|\|\|\|\|.\|\|\|\|\|\|\|\|\|\|\|.\|\|\|\|\|\|\|\|\|\|\|\|\|\|\|\|\|\|\|\|\|\|\|\|\|\|\|\|\| | |
| v.1 | 728 | atttatgaattgagccaggtttggtccgtggtgtcccccgcacccagcag | 777 |
| v.2 | 812 | gggacaggcactcaggagggcccggtaaaggctgagatgaagtggactga | 861 |
| | | \|\|\|\|\|\|\|\|\|\|.\|\|\|\|\|\|\|\|\|\|\|\|.\|\|\|\|\|\|\|\|\|\|\|\|\|\|\|\|\|\|\|\|\|\|\|\|\|\| | |
| v.1 | 778 | gggacaggcaatcaggagggcccagtaaaggctgagatgaagtggactga | 827 |
| v.2 | 862 | gtagaactggaggacaggagtcgacgtgagttcctgggagtctccagaga | 911 |
| | | \|\|\|\|\|\|\|\|\|\|\|\|\|\|\|\|.\|\|\|\|.\|\|\|\|\|\|\|\|\|\|\|\|\|\|\|\|\|\|\|.\|\|\|\|\|\|\|\| | |
| v.1 | 828 | gtagaactggaggacaagagttgacgtgagttcctgggagtttccagaga | 877 |
| v.2 | 912 | tggggcctggaggcctggaggaaggggccaggcctcacattcgtggggct | 961 |
| | | \|\|\|\|\|\|\|\|\|\|\|\|\|\|\|\|\|\|\|\|\|\|\|\|\|\|\|\|\|\|\|\|\|\|\|\|\|\|\|\|\|.\|\|\|\|\|\|\|\| | |
| v.1 | 878 | tggggcctggaggcctggaggaaggggccaggcctcacatttgtggggct | 927 |
| v.2 | 962 | ccctgaatggcagcctcagcacagcgtaggcccttaataaacacctgttg | 1011 |
| | | \|\|\| \|\|\|\|\|\|\|\|\|\|\|\|.\|\|\|\|\|\|\|\|\|\|\|\|\|\|\|\|\|\|\|\|\|\|\|\|\|\|\|\|\|\|\|\|\| | |
| v.1 | 928 | ccc-gaatggcagcctgagcacagcgtaggcccttaataaacacctgttg | 976 |
| v.2 | 1012 | gataagcca | 1020 |
| | | \|\|\|\|\|\|\|\|\| | |
| v.1 | 977 | gataagcca | 985 |

[1429] TABLE LIV(a)
Peptide sequences of protein coded by PSCA v.2 (SEQ ID NO:6530)

| | | | | | | |
|---|---|---|---|---|---|---|
| MKAVLLALLM | AGLALQPGTA | LLCYSCKAQV | SNEDCLQVEN | CTQLGEQCWT | ARIRAVGLLT | 60 |
| VISKGCSLNC | VDDSQDYYVG | KKNTTCCDTD | LCNASGAHAL | QPAAAILALL | PALGLLLWGP | 120 |
| GQL | | | | | | |

[1430] TABLE LV(a)

Amino acid sequence alignment of PSCA v.2
(SEQ ID NO:6531) and PSCA v.1 (SEQ ID NO:6532)

| | | | |
|---|---|---|---|
| v.2 | 1 | MKAVLLALLMAGLALQPGTALLCYSCKAQVSNEDCLQVENCTQLGEQCWT | 50 |
| | | \|\|\|\|\|\|\|\|\|\|\|\|\|\|\|\|\|\|\|\|\|\|\|\|\|\|\|\|\|\|\|\|\|\|\|\|\|\|\|\|\|\|\|\|\|\|\|\|\|\| | |
| v.1 | 1 | MKAVLLALLMAGLALQPGTALLCYSCKAQVSNEDCLQVENCTQLGEQCWT | 50 |
| v.2 | 51 | ARIRAVGLLTVISKGCSLNCVDDSQDYYVGKKNITCCDTDLCNASGAHAL | 100 |
| | | \|\|\|\|\|\|\|\|\|\|\|\|\|\|\|\|\|\|\|\|\|\|\|\|\|\|\|\|\|\|\|\|\|\|\|\|\|\|\|\|\|\|\|\|\|\|\|\|\|\| | |
| v.1 | 51 | ARIRAVGLLTVISKGCSLNCVDDSQDYYVGKKNITCCDTDLCNASGAHAL | 100 |
| v.2 | 101 | QPAAAILALLPALGLLLWGPGQL | 123 |
| | | \|\|\|\|\|\|\|\|\|\|\|\|\|\|\|\|\|\|\|\|\|\|\| | |
| v.1 | 101 | QPAAAILALLPALGLLLWGPGQL | 123 |

[1431] TABLE LII(b)
Nucleotide sequence of transcript variant PSCA v.3 (SEQ ID NO:6533)

| | | | | | | |
|---|---|---|---|---|---|---|
| tttgaggcca | tataaagtca | cctgaggccc | tctccaccac | agcccaccag | tgaccatgaa | 60 |
| ggctgtgctg | cttgccctgt | tgatggcagg | cttggccctg | cagccaggca | ctgccctgct | 120 |
| gtgctactcc | tgcaaagccc | aggcgcagtt | ggcctcctga | ccgtcatcag | caaaggctgc | 180 |
| agcttgaact | gcgtggatga | ctcacaggac | tactacgtgg | gcaagaagaa | catcacgtgc | 240 |
| tgtgacaccg | acttgtgcac | tcggcctgct | gctctgggga | cccggccagc | tataggctct | 300 |
| ggggggcccc | gctgcagccc | acactgggtg | tggtgcccca | ggcctctgtg | ccactcctca | 360 |
| cacacccggc | ccagtgggag | cctgtcctgg | ttcctgaggc | acatcctaac | gcaagtctga | 420 |
| ccatgtatgt | ctgcgcccct | gtcccccacc | ctgaccctcc | catggccctc | tccaggactc | 480 |
| ccacccggca | gatcggctct | attgacacag | atccgcctgc | agatggcccc | tccaaccctc | 540 |
| tctgctgctg | tttccatggc | ccagcattct | ccacccttaa | ccctgtgctc | aggcacctct | 600 |
| tcccccagga | agccttccct | gcccacccca | tctatgactt | gagccaggtc | tggtccgtgg | 660 |
| tgtcccccgc | acccagcagg | ggacaggcac | tcaggagggc | ccggtaaagg | ctgagatgaa | 720 |
| gtggactgag | tagaactgga | ggacaggagt | cgacgtgagt | tcctgggagt | ctccagagat | 780 |
| ggggcctgga | ggcctggagg | aaggggccag | gcctcacatt | cgtggggctc | cctgaatggc | 840 |
| agcctcagca | cagcgtaggc | ccttaataaa | cacctgttgg | ataagcca | | 888 |

[1432] TABLE LIII(b)

Nucleotide sequence alignment of PSCA v.2
(SEQ ID NO:6534) and PSCA v.3 (SEQ ID NO:6535)

| | | | |
|---|---|---|---|
| v.2 | 1 | tttgaggccatataaagtcacctgaggccctctccaccacagcccaccag | 50 |
| | | \|\|\|\|\|\|\|\|\|\|\|\|\|\|\|\|\|\|\|\|\|\|\|\|\|\|\|\|\|\|\|\|\|\|\|\|\|\|\|\|\|\|\|\|\|\|\|\|\|\| | |
| v.3 | 1 | tttgaggccatataaagtcacctgaggccctctccaccacagcccaccag | 50 |
| v.2 | 51 | tgaccatgaaggctgtgctgcttgccctgttgatggcaggcttggccctg | 100 |
| | | \|\|\|\|\|\|\|\|\|\|\|\|\|\|\|\|\|\|\|\|\|\|\|\|\|\|\|\|\|\|\|\|\|\|\|\|\|\|\|\|\|\|\|\|\|\|\|\|\|\| | |
| v.3 | 51 | tgaccatgaaggctgtgctgcttgccctgttgatggcaggcttggccctg | 100 |
| v.2 | 101 | cagccaggcactgccctgctgtgctactcctgcaaagcccaggtgagcaa | 150 |
| | | \|\|\|\|\|\|\|\|\|\|\|\|\|\|\|\|\|\|\|\|\|\|\|\|\|\|\|\|\|\|\|\|\|\|\|\|\|\|\|\|\|\| | |
| v.3 | 101 | cagccaggcactgccctgctgtgctactcctgcaaagcccag-------- | 142 |
| v.2 | 151 | cgaggactgcctgcaggtggagaactgcacccagctgggggagcagtgct | 200 |
| v.3 | 143 | -------------------------------------------------- | 142 |
| v.2 | 201 | ggaccgcgcgcatccgcgcagttggcctcctgaccgtcatcagcaaaggc | 250 |
| | | \|\|\|\|\|\|\|\|\|\|\|\|\|\|\|\|\|\|\|\|\|\|\|\|\|\|\|\|\|\|\|\|\|\|\| | |
| v.3 | 143 | ---------------gcgcagttggcctcctgaccgtcatcagcaaaggc | 177 |
| v.2 | 251 | tgcagcttgaactgcgtggatgactcacaggactactacgtgggcaagaa | 300 |
| | | \|\|\|\|\|\|\|\|\|\|\|\|\|\|\|\|\|\|\|\|\|\|\|\|\|\|\|\|\|\|\|\|\|\|\|\|\|\|\|\|\|\|\|\|\|\|\|\|\|\| | |
| v.3 | 178 | tgcagcttgaactgcgtggatgactcacaggactactacgtgggcaagaa | 227 |
| v.2 | 301 | gaacatcacgtgctgtgacaccgacttgtgcaacgccagcggggcccatg | 350 |
| | | \|\|\|\|\|\|\|\|\|\|\|\|\|\|\|\|\|\|\|\|\|\|\|\|\|\|\|\| | |
| v.3 | 228 | gaacatcacgtgctgtgacaccgacttg---------------------- | 255 |
| v.2 | 351 | ccctgcagccggctgccgccatccttgcgctgctccctgcactcggcctg | 400 |
| | | \|\|\|\|\|\|\|\|\|\|\|\|\| | |
| v.3 | 256 | -------------------------------------tgcactcggcctg | 268 |
| v.2 | 401 | ctgctctggggacccggccagctataggctctggggggccccgctgcagc | 450 |
| | | \|\|\|\|\|\|\|\|\|\|\|\|\|\|\|\|\|\|\|\|\|\|\|\|\|\|\|\|\|\|\|\|\|\|\|\|\|\|\|\|\|\|\|\|\|\|\|\|\|\| | |
| v.3 | 269 | ctgctctggggacccggccagctataggctctggggggccccgctgcagc | 318 |
| v.2 | 451 | ccacactgggtgtggtgccccaggcctctgtgccactcctcacacacccg | 500 |
| | | \|\|\|\|\|\|\|\|\|\|\|\|\|\|\|\|\|\|\|\|\|\|\|\|\|\|\|\|\|\|\|\|\|\|\|\|\|\|\|\|\|\|\|\|\|\|\|\|\|\| | |
| v.3 | 319 | ccacactgggtgtggtgccccaggcctctgtgccactcctcacacacccg | 368 |
| v.2 | 501 | gcccagtgggagcctgtcctggttcctgaggcacatcctaacgcaagtct | 550 |
| | | \|\|\|\|\|\|\|\|\|\|\|\|\|\|\|\|\|\|\|\|\|\|\|\|\|\|\|\|\|\|\|\|\|\|\|\|\|\|\|\|\|\|\|\|\|\|\|\|\|\| | |
| v.3 | 369 | gcccagtgggagcctgtcctggttcctgaggcacatcctaacgcaagtct | 418 |
| v.2 | 551 | gaccatgtatgtctgcgcccctgtcccccaccctgaccctcccatggccc | 600 |
| | | \|\|\|\|\|\|\|\|\|\|\|\|\|\|\|\|\|\|\|\|\|\|\|\|\|\|\|\|\|\|\|\|\|\|\|\|\|\|\|\|\|\|\|\|\|\|\|\|\|\| | |
| v.3 | 419 | gaccatgtatgtctgcgcccctgtcccccaccctgaccctcccatggccc | 468 |
| v.2 | 601 | tctccaggactcccacccggcagatcggctctattgacacagatccgcct | 650 |
| | | \|\|\|\|\|\|\|\|\|\|\|\|\|\|\|\|\|\|\|\|\|\|\|\|\|\|\|\|\|\|\|\|\|\|\|\|\|\|\|\|\|\|\|\|\|\|\|\|\|\| | |
| v.3 | 469 | tctccaggactcccacccggcagatcggctctattgacacagatccgcct | 518 |
| v.2 | 651 | gcagatggcccctccaaccctctctgctgctgtttccatggcccagcatt | 700 |
| | | \|\|\|\|\|\|\|\|\|\|\|\|\|\|\|\|\|\|\|\|\|\|\|\|\|\|\|\|\|\|\|\|\|\|\|\|\|\|\|\|\|\|\|\|\|\|\|\|\|\| | |
| v.3 | 519 | gcagatggcccctccaaccctctctgctgctgtttccatggcccagcatt | 568 |
| v.2 | 701 | ctccacccttaaccctgtgctcaggcacctcttcccccaggaagccttcc | 750 |
| | | \|\|\|\|\|\|\|\|\|\|\|\|\|\|\|\|\|\|\|\|\|\|\|\|\|\|\|\|\|\|\|\|\|\|\|\|\|\|\|\|\|\|\|\|\|\|\|\|\|\| | |
| v.3 | 569 | ctccacccttaaccctgtgctcaggcacctcttcccccaggaagccttcc | 618 |
| v.2 | 751 | ctgcccaccccatctatgacttgagccaggtctggtccgtggtgtccccc | 800 |
| | | \|\|\|\|\|\|\|\|\|\|\|\|\|\|\|\|\|\|\|\|\|\|\|\|\|\|\|\|\|\|\|\|\|\|\|\|\|\|\|\|\|\|\|\|\|\|\|\|\|\| | |
| v.3 | 619 | ctgcccaccccatctatgacttgagccaggtctggtccgtggtgtccccc | 668 |
| v.2 | 801 | gcacccagcaggggacaggcactcaggagggcccggtaaaggctgagatg | 850 |
| | | \|\|\|\|\|\|\|\|\|\|\|\|\|\|\|\|\|\|\|\|\|\|\|\|\|\|\|\|\|\|\|\|\|\|\|\|\|\|\|\|\|\|\|\|\|\|\|\|\|\| | |
| v.3 | 669 | gcacccagcaggggacaggcactcaggagggcccggtaaaggctgagatg | 718 |
| v.2 | 851 | aagtggactgagtagaactggaggacaggagtcgacgtgagttcctggga | 900 |
| | | \|\|\|\|\|\|\|\|\|\|\|\|\|\|\|\|\|\|\|\|\|\|\|\|\|\|\|\|\|\|\|\|\|\|\|\|\|\|\|\|\|\|\|\|\|\|\|\|\|\| | |
| v.3 | 719 | aagtggactgagtagaactggaggacaggagtcgacgtgagttcctggga | 768 |
| v.2 | 901 | gtctccagagatggggcctggaggcctggaggaaggggccaggcctcaca | 950 |
| | | \|\|\|\|\|\|\|\|\|\|\|\|\|\|\|\|\|\|\|\|\|\|\|\|\|\|\|\|\|\|\|\|\|\|\|\|\|\|\|\|\|\|\|\|\|\|\|\|\|\| | |
| v.3 | 769 | gtctccagagatggggcctggaggcctggaggaaggggccaggcctcaca | 818 |
| v.2 | 951 | ttcgtggggctccctgaatggcagcctcagcacagcgtaggcccttaata | 1000 |
| | | \|\|\|\|\|\|\|\|\|\|\|\|\|\|\|\|\|\|\|\|\|\|\|\|\|\|\|\|\|\|\|\|\|\|\|\|\|\|\|\|\|\|\|\|\|\|\|\|\|\| | |
| v.3 | 819 | ttcgtggggctccctgaatggcagcctcagcacagcgtaggcccttaata | 868 |
| v.2 | 1001 | aacacctgttggataagcca | 1020 |
| | | \|\|\|\|\|\|\|\|\|\|\|\|\|\|\|\|\|\|\|\| | |
| v.3 | 869 | aacacctgttggataagcca | 888 |

[1433] TABLE LIV(b)
Peptide sequences of protein coded by PSCA v.3 (SEQ ID NO:6536)

| | | | | | | |
|---|---|---|---|---|---|---|
| MYVCAPVPHP | DPPMALSRTP | TRQIGSIDTD | PPADGPSNPL | CCCFHGPAFS | TLNPVLRHLF | 60 |
| PQEAFPAHPI | YDLSQVWSVV | SPAPSRGQAL | RRAR | | | 94 |

[1434] TABLE LV(b)

Amino acid sequence alignment of PSCA v.2
and PSCA v.3

NO SIGNIFICANT HOMOLOGY

[1435] TABLE LII(c)

Nucleotide sequence of transcript variant PSCA v.4
(SEQ ID NO:6537)

| | | | | | | |
|---|---|---|---|---|---|---|
| gacagtgaac | cctgcgctga | aggcgttggg | gctcctgcag | ttctggggca | gccacaggcg | 60 |
| cccagggttt | cgtgccgatc | agcccaggac | ggtcttcccg | gtgcagtttc | tgatgcgggg | 120 |
| agggcagtgc | tgccttccgg | tcaccaggac | cagtgctcag | cccgcctgct | tgaccccctt | 180 |
| acttagctgg | ggtccaatcc | atacccaatt | tagatgattc | agacgatggg | atttgaaact | 240 |
| tttgaactgg | gtgcgactta | agcactgccc | tgctgtgcta | ctcctgcaaa | gcccaggtga | 300 |
| gcaacgagga | ctgcctgcag | gtggagaact | gcacccagct | gggggagcag | tgctggaccg | 360 |
| cgcgcatccg | cgcagttggc | ctcctgaccg | tcatcagcaa | aggctgcagc | ttgaactgcg | 420 |
| tggatgactc | acaggactac | tacgtgggca | agaagaacat | cacgtgctgt | gacaccgact | 480 |
| tgtgcaacgc | cagcggggcc | catgccctgc | agccggctgc | cgccatcctt | gcgctgctcc | 540 |
| ctgcactcgg | cctgctgctc | tggggacccg | gccagctata | ggctctgggg | ggccccgctg | 600 |
| cagcccacac | tgggtgtggt | gccccaggcc | tctgtgccac | tcctcacaca | cccggcccag | 660 |
| tgggagcctg | tcctggttcc | tgaggcacat | cctaacgcaa | gtctgaccat | gtatgtctgc | 720 |
| gcccctgtcc | cccaccctga | ccctcccatg | gccctctcca | ggactcccac | ccggcagatc | 780 |
| ggctctattg | acacagatcc | gcctgcagat | ggcccctcca | accctctctg | ctgctgtttc | 840 |
| catggcccag | cattctccac | ccttaaccct | gtgctcaggc | acctcttccc | ccaggaagcc | 900 |
| ttccctgccc | accccatcta | tgacttgagc | caggtctggt | ccgtggtgtc | ccccgcaccc | 960 |
| agcaggggac | aggcactcag | gagggcccgg | taaaggctga | gatgaagtgg | actgagtaga | 1020 |
| actggaggac | aggagtcgac | gtgagttcct | gggagtctcc | agagatgggg | cctggaggcc | 1080 |
| tggaggaagg | ggccaggcct | cacattcgtg | gggctccctg | aatggcagcc | tcagcacagc | 1140 |
| gtaggccctt | aataaacacc | tgttggataa | gcca | | | 1174 |

[1436] TABLE LIII(c)

Nucleotide sequence alignment of PSCA v.2 (SEQ ID NO:6538)
and PSCA v.4 (SEQ ID NO:6539)

| | | | |
|---|---|---|---|
| v.2 | 1 | tttgaggccatataaagtcacctgaggccctctccacca----------- | 39 |
| | | \|.\|\|.\|\|\| \|\|.\|\|\| \|\|\|\|.\| \|\|\| | |
| v.4 | 42 | tctggggc-------agccac---aggcgc------ccagggtttcgtgc | 75 |
| v.2 | 40 | ----cagccca-----------ccagtgacca-------------tgaag | 61 |
| | | \|\|\|\|\|\|\| \|\|.\|\|\| \|\| .\|\|.\| | |
| v.4 | 76 | cgatcagcccaggacggtcttcccggtg--cagtttctgatgcggggagg | 123 |
| v.2 | 62 | gctgtgctg-cttgccctgt------------tgatggcag-------gc | 91 |
| | | \|\|.\|\|\|\|\|\| \|\|\| \|\|.\|\| \|\|.\| \|\|\| \|\| | |
| v.4 | 124 | gcagtgctgcctt--ccggtcaccaggaccagtgct--cagcccgcctgc | 169 |
| v.2 | 92 | ttggccc-----------------------------------------tg | 100 |
| | | \|\|\|.\|\|\| \|. | |
| v.4 | 170 | ttgacccccttacttagctggggtccaatccatacccaatttagatgatt | 219 |
| v.2 | 101 | cagcc-----------------------------------aggcactgcc | 115 |
| | | \|\|\|.\| \|.\|\|\|\|\|\|\|\| | |
| v.4 | 220 | cagacgatgggatttgaaacttttgaactgggtgcgacttaagcactgcc | 269 |
| v.2 | 116 | ctgctgtgctactcctgcaaagcccaggtgagcaacgaggactgcctgca | 165 |
| | | \|\|\|\|\|\|\|\|\|\|\|\|\|\|\|\|\|\|\|\|\|\|\|\|\|\|\|\|\|\|\|\|\|\|\|\|\|\|\|\|\|\|\|\|\|\|\|\|\|\| | |
| v.4 | 270 | ctgctgtgctactcctgcaaagcccaggtgagcaacgaggactgcctgca | 319 |
| v.2 | 166 | ggtggagaactgcacccagctgggggagcagtgctggaccgcgcgcatcc | 215 |
| | | \|\|\|\|\|\|\|\|\|\|\|\|\|\|\|\|\|\|\|\|\|\|\|\|\|\|\|\|\|\|\|\|\|\|\|\|\|\|\|\|\|\|\|\|\|\|\|\|\|\| | |
| v.4 | 320 | ggtggagaactgcacccagctgggggagcagtgctggaccgcgcgcatcc | 369 |
| v.2 | 216 | gcgcagttggcctcctgaccgtcatcagcaaaggctgcagcttgaactgc | 265 |
| | | \|\|\|\|\|\|\|\|\|\|\|\|\|\|\|\|\|\|\|\|\|\|\|\|\|\|\|\|\|\|\|\|\|\|\|\|\|\|\|\|\|\|\|\|\|\|\|\|\|\| | |
| v.4 | 370 | gcgcagttggcctcctgaccgtcatcagcaaaggctgcagcttgaactgc | 419 |
| v.2 | 266 | gtggatgactcacaggactactacgtgggcaagaagaacatcacgtgctg | 315 |
| | | \|\|\|\|\|\|\|\|\|\|\|\|\|\|\|\|\|\|\|\|\|\|\|\|\|\|\|\|\|\|\|\|\|\|\|\|\|\|\|\|\|\|\|\|\|\|\|\|\|\| | |
| v.4 | 420 | gtggatgactcacaggactactacgtgggcaagaagaacatcacgtgctg | 469 |
| v.2 | 316 | tgacaccgacttgtgcaacgccagcggggcccatgccctgcagccggctg | 365 |
| | | \|\|\|\|\|\|\|\|\|\|\|\|\|\|\|\|\|\|\|\|\|\|\|\|\|\|\|\|\|\|\|\|\|\|\|\|\|\|\|\|\|\|\|\|\|\|\|\|\|\| | |
| v.4 | 470 | tgacaccgacttgtgcaacgccagcggggcccatgccctgcagccggctg | 519 |
| v.2 | 366 | ccgccatccttgcgctgctccctgcactcggcctgctgctctggggaccc | 415 |
| | | \|\|\|\|\|\|\|\|\|\|\|\|\|\|\|\|\|\|\|\|\|\|\|\|\|\|\|\|\|\|\|\|\|\|\|\|\|\|\|\|\|\|\|\|\|\|\|\|\|\| | |
| v.4 | 520 | ccgccatccttgcgctgctccctgcactcggcctgctgctctggggaccc | 569 |
| v.2 | 416 | ggccagctataggctctggggggccccgctgcagcccacactgggtgtgg | 465 |
| | | \|\|\|\|\|\|\|\|\|\|\|\|\|\|\|\|\|\|\|\|\|\|\|\|\|\|\|\|\|\|\|\|\|\|\|\|\|\|\|\|\|\|\|\|\|\|\|\|\|\| | |
| v.4 | 570 | ggccagctataggctctggggggccccgctgcagcccacactgggtgtgg | 619 |
| v.2 | 466 | tgccccaggcctctgtgccactcctcacacacccggcccagtgggagcct | 515 |
| | | \|\|\|\|\|\|\|\|\|\|\|\|\|\|\|\|\|\|\|\|\|\|\|\|\|\|\|\|\|\|\|\|\|\|\|\|\|\|\|\|\|\|\|\|\|\|\|\|\|\| | |
| v.4 | 620 | tgccccaggcctctgtgccactcctcacacacccggcccagtgggagcct | 669 |
| v.2 | 516 | gtcctggttcctgaggcacatcctaacgcaagtctgaccatgtatgtctg | 565 |
| | | \|\|\|\|\|\|\|\|\|\|\|\|\|\|\|\|\|\|\|\|\|\|\|\|\|\|\|\|\|\|\|\|\|\|\|\|\|\|\|\|\|\|\|\|\|\|\|\|\|\| | |
| v.4 | 670 | gtcctggttcctgaggcacatcctaacgcaagtctgaccatgtatgtctg | 719 |
| v.2 | 566 | cgcccctgtcccccaccctgaccctcccatggccctctccaggactccca | 615 |
| | | \|\|\|\|\|\|\|\|\|\|\|\|\|\|\|\|\|\|\|\|\|\|\|\|\|\|\|\|\|\|\|\|\|\|\|\|\|\|\|\|\|\|\|\|\|\|\|\|\|\| | |
| v.4 | 720 | cgcccctgtcccccaccctgaccctcccatggccctctccaggactccca | 769 |
| v.2 | 616 | cccggcagatcggctctattgacacagatccgcctgcagatggcccctcc | 665 |
| | | \|\|\|\|\|\|\|\|\|\|\|\|\|\|\|\|\|\|\|\|\|\|\|\|\|\|\|\|\|\|\|\|\|\|\|\|\|\|\|\|\|\|\|\|\|\|\|\|\|\| | |
| v.4 | 770 | cccggcagatcggctctattgacacagatccgcctgcagatggcccctcc | 819 |
| v.2 | 666 | aaccctctctgctgctgtttccatggcccagcattctccacccttaaccc | 715 |
| | | \|\|\|\|\|\|\|\|\|\|\|\|\|\|\|\|\|\|\|\|\|\|\|\|\|\|\|\|\|\|\|\|\|\|\|\|\|\|\|\|\|\|\|\|\|\|\|\|\|\| | |
| v.4 | 820 | aaccctctctgctgctgtttccatggcccagcattctccacccttaaccc | 869 |
| v.2 | 716 | tgtgctcaggcacctcttcccccaggaagccttccctgcccaccccatct | 765 |
| | | \|\|\|\|\|\|\|\|\|\|\|\|\|\|\|\|\|\|\|\|\|\|\|\|\|\|\|\|\|\|\|\|\|\|\|\|\|\|\|\|\|\|\|\|\|\|\|\|\|\| | |
| v.4 | 870 | tgtgctcaggcacctcttcccccaggaagccttccctgcccaccccatct | 919 |
| v.2 | 766 | atgacttgagccaggtctggtccgtggtgtcccccgcacccagcagggga | 815 |
| | | \|\|\|\|\|\|\|\|\|\|\|\|\|\|\|\|\|\|\|\|\|\|\|\|\|\|\|\|\|\|\|\|\|\|\|\|\|\|\|\|\|\|\|\|\|\|\|\|\|\| | |
| v.4 | 920 | atgacttgagccaggtctggtccgtggtgtcccccgcacccagcagggga | 969 |
| v.2 | 816 | caggcactcaggagggcccggtaaaggctgagatgaagtggactgagtag | 865 |
| | | \|\|\|\|\|\|\|\|\|\|\|\|\|\|\|\|\|\|\|\|\|\|\|\|\|\|\|\|\|\|\|\|\|\|\|\|\|\|\|\|\|\|\|\|\|\|\|\|\|\| | |
| v.4 | 970 | caggcactcaggagggcccggtaaaggctgagatgaagtggactgagtag | 1019 |
| v.2 | 866 | aactggaggacaggagtcgacgtgagttcctgggagtctccagagatggg | 915 |
| | | \|\|\|\|\|\|\|\|\|\|\|\|\|\|\|\|\|\|\|\|\|\|\|\|\|\|\|\|\|\|\|\|\|\|\|\|\|\|\|\|\|\|\|\|\|\|\|\|\|\| | |
| v.4 | 1020 | aactggaggacaggagtcgacgtgagttcctgggagtctccagagatggg | 1069 |
| v.2 | 916 | gcctggaggcctggaggaaggggccaggcctcacattcgtggggctccct | 965 |
| | | \|\|\|\|\|\|\|\|\|\|\|\|\|\|\|\|\|\|\|\|\|\|\|\|\|\|\|\|\|\|\|\|\|\|\|\|\|\|\|\|\|\|\|\|\|\|\|\|\|\| | |
| v.4 | 1070 | gcctggaggcctggaggaaggggccaggcctcacattcgtggggctccct | 1119 |
| v.2 | 966 | gaatggcagcctcagcacagcgtaggcccttaataaacacctgttggata | 1015 |
| | | \|\|\|\|\|\|\|\|\|\|\|\|\|\|\|\|\|\|\|\|\|\|\|\|\|\|\|\|\|\|\|\|\|\|\|\|\|\|\|\|\|\|\|\|\|\|\|\|\|\| | |
| v.4 | 1120 | gaatggcagcctcagcacagcgtaggcccttaataaacacctgttggata | 1169 |
| v.2 | 1016 | agcca | 1020 |
| | | \|\|\|\|\| | |
| v.4 | 1170 | agcca | 1174 |

[1437] TABLE LIV(c)
Peptide sequences of protein coded by PSCA v.4 (SEQ ID NO:640)

| | | | | | | |
|---|---|---|---|---|---|---|
| MTHRTTTWAR | RTSRAVTPTC | ATPAGPMPCS | RLPPSLRCSL | HSACCSGDPA | SYRLWGAPLQ | 60 |
| PTLGVVPQAS | VPLLTHPAQW | EPVLVPEAHP | NASLTMYVCA | PVPHPDPPMA | LSRTPTRQIG | 120 |
| SIDTDPPADG | PSNPLCCCFH | GPAFSTLNPV | LRHLFPQEAF | PAHPIYDLSQ | VWSVVSPAPS | 180 |
| RGQALRRAR | | | | | | |

[1438] TABLE LV(c)
Amino acid sequence alignment of PSCA v.2 and PSCA v.4
NO SIGNIFICANT HOMOLOGY

[1439] TABLE LII(d)
Nucleotide sequence of transcript variant PSCA v.5 (SEQ ID NO:6541)

| | | | | | | |
|---|---|---|---|---|---|---|
| gacagtgaac | cctgcgctga | aggcgttggg | gctcctgcag | ttctggggca | gccacaggcg | 60 |
| cccagggttt | cgtgccgatc | agcccaggac | ggtcttcccg | gtgcagtttc | tgatgcgggg | 120 |
| agggcagtgc | tgccttccgg | tcaccaggac | cagtgctcag | cccgcctgct | tgaccccctt | 180 |
| acttagctgg | ggtccaatcc | atacccaatt | tagatgattc | agacgatggg | atttgaaact | 240 |
| tttgaactgg | gtgcgactta | agcactgccc | tgctgtgcta | ctcctgcaaa | gcccaggtga | 300 |
| gcaacgagga | ctgcctgcag | gtggagaact | gcacccagct | gggggagcag | tgctggaccg | 360 |
| cgcgcatccg | tgagtggggg | gacgacagcc | gccaggccta | ggtctctgcc | actgaactat | 420 |
| taatctttct | ggccatctgt | ccgcatctgt | gtgctgtttt | ccttccacct | gtccccgacc | 480 |
| cgtcccgcac | ctgcaccccc | aacaatcacc | cagcatctgt | ccctccagcc | atcctcctcc | 540 |
| atctgccact | cctccactca | tctgtccctc | cccatcctcc | atcttccact | cctccaccca | 600 |
| tctgtccctc | cccatccctg | agctcactta | ctcactcacc | ccatttctga | cgctcagcgg | 660 |
| gtggtccatc | tgcctcggac | atctggatag | ggctgagacc | agggccgaga | ccaggccctc | 720 |
| gcactgcttg | caatcctgag | gccagcccag | ggggactcta | gagcattagg | cagggtggga | 780 |
| caggaggagg | cctggggcag | gtcaggcagg | tgagcacaca | gggcagcccc | atccccggat | 840 |
| cccgctgctc | cccaggcgca | gttggcctcc | tgaccgtcat | cagcaaaggc | tgcagcttga | 900 |
| actgcgtgga | tgactcacag | gactactacg | tgggcaagaa | gaacatcacg | tgctgtgaca | 960 |
| ccgacttgtg | caacgccagc | ggggcccatg | ccctgcagcc | ggctgccgcc | atccttgcgc | 1020 |
| tgctccctgc | actcggcctg | ctgctctggg | gacccggcca | gctataggct | ctggggggcc | 1080 |
| ccgctgcagc | ccacactggg | tgtggtgccc | caggcctctg | tgccactcct | cacacacccg | 1140 |
| gcccagtggg | agcctgtcct | ggttcctgag | gcacatccta | acgcaagtct | gaccatgtat | 1200 |
| gtctgcgccc | ctgtccccca | ccctgaccct | cccatggccc | tctccaggac | tcccacccgg | 1260 |
| cagatcggct | ctattgacac | agatccgcct | gcagatggcc | cctccaaccc | tctctgctgc | 1320 |
| tgtttccatg | gcccagcatt | ctccaccctt | aaccctgtgc | tcaggcacct | cttcccccag | 1380 |
| gaagccttcc | ctgcccaccc | catctatgac | ttgagccagg | tctggtccgt | ggtgtccccc | 1440 |
| gcacccagca | ggggacaggc | actcaggagg | gcccggtaaa | ggctgagatg | aagtggactg | 1500 |
| agtagaactg | gaggacagga | gtcgacgtga | gttcctggga | gtctccagag | atggggcctg | 1560 |
| gaggcctgga | ggaaggggcc | aggcctcaca | ttcgtggggc | tccctgaatg | gcagcctcag | 1620 |
| cacagcgtag | gcccttaata | aacacctgtt | ggataagcca | | | 1660 |

[1440] TABLE LIII(d)

Nucleotide sequence alignment of PSCA v.2
(SEQ ID NO:6542 and PSCA v.5 (SEQ ID NO:6543)

| | | | |
|---|---|---|---|
| v.2 | 1 | tttgaggccatataaagtcacctgaggccctctccacca----------- | 39 |
| | | \|.\|\|.\|\|\| \|\|.\|\|\| \|\|\|\|.\| \|\|\| | |
| v.5 | 42 | tctggggc-------agccac---aggcgc------ccagggtttcgtgc | 75 |
| v.2 | 40 | ----cagccca-----------ccagtgacca-------------tgaag | 61 |
| | | \|\|\|\|\|\|\| \|\|.\|\|\| \|\| .\|\|.\| | |
| v.5 | 76 | cgatcagcccaggacggtcttcccggtg--cagtttctgatgcggggagg | 123 |
| v.2 | 62 | gctgtgctg-cttgccctgt------------tgatggcag-------gc | 91 |
| | | \|\|.\|\|\|\|\|\| \|\|\| \|\|.\|\| \|\|.\| \|\|\| \|\| | |
| v.5 | 124 | gcagtgctgcctt--ccggtcaccaggaccagtgct--cagcccgcctgc | 169 |
| v.2 | 92 | ttggccc-----------------------------------------tg | 100 |
| | | \|\|\|.\|\|\| \|. | |
| v.5 | 170 | ttgacccccttacttagctggggtccaatccatacccaatttagatgatt | 219 |
| v.2 | 101 | cagcc----------------------------------aggcactgcc | 115 |
| | | \|\|\|.\| \|.\|\|\|\|\|\|\|\| | |
| v.5 | 220 | cagacgatgggatttgaaacttttgaactgggtgcgacttaagcactgcc | 269 |
| v.2 | 116 | ctgctgtgctactcctgcaaagcccaggtgagcaacgaggactgcctgca | 165 |
| | | \|\|\|\|\|\|\|\|\|\|\|\|\|\|\|\|\|\|\|\|\|\|\|\|\|\|\|\|\|\|\|\|\|\|\|\|\|\|\|\|\|\|\|\|\|\|\|\|\|\| | |
| v.5 | 270 | ctgctgtgctactcctgcaaagcccaggtgagcaacgaggactgcctgca | 319 |
| v.2 | 166 | ggtggagaactgcacccagctgggggagcagtgctggaccgcgcgcatcc | 215 |
| | | \|\|\|\|\|\|\|\|\|\|\|\|\|\|\|\|\|\|\|\|\|\|\|\|\|\|\|\|\|\|\|\|\|\|\|\|\|\|\|\|\|\|\|\|\|\|\|\|\|\| | |
| v.5 | 320 | ggtggagaactgcacccagctgggggagcagtgctggaccgcgcgcatcc | 369 |
| v.2 | 216 | -------------------------------------------------- | 215 |
| v.5 | 370 | gtgagtggggggacgacagccgccaggcctaggtctctgccactgaacta | 419 |
| v.2 | 216 | -------------------------------------------------- | 215 |
| v.5 | 420 | ttaatctttctggccatctgtccgcatctgtgtgctgttttccttccacc | 469 |
| v.2 | 216 | -------------------------------------------------- | 215 |
| v.5 | 470 | tgtccccgacccgtcccgcacctgcacccccaacaatcacccagcatctg | 519 |
| v.2 | 216 | -------------------------------------------------- | 215 |
| v.5 | 520 | tccctccagccatcctcctccatctgccactcctccactcatctgtccct | 569 |
| v.2 | 216 | -------------------------------------------------- | 215 |
| v.5 | 570 | ccccatcctccatcttccactcctccacccatctgtccctccccatccct | 619 |
| v.2 | 216 | -------------------------------------------------- | 215 |
| v.5 | 620 | gagctcacttactcactcaccccatttctgacgctcagcgggtggtccat | 669 |
| v.2 | 216 | -------------------------------------------------- | 215 |
| v.5 | 670 | ctgcctcggacatctggatagggctgagaccagggccgagaccaggccct | 719 |
| v.2 | 216 | -------------------------------------------------- | 215 |
| v.5 | 720 | cgcactgcttgcaatcctgaggccagcccagggggactctagagcattag | 769 |
| v.2 | 216 | -------------------------------------------------- | 215 |
| v.5 | 770 | gcagggtgggacaggaggaggcctggggcaggtcaggcaggtgagcacac | 819 |
| v.2 | 216 | ------------------------------------gcgcagttggcctc | 229 |
| | | \|\|\|\|\|\|\|\|\|\|\|\|\|\| | |
| v.5 | 820 | agggcagccccatccccggatcccgctgctccccaggcgcagttggcctc | 869 |
| v.2 | 230 | ctgaccgtcatcagcaaaggctgcagcttgaactgcgtggatgactcaca | 279 |
| | | \|\|\|\|\|\|\|\|\|\|\|\|\|\|\|\|\|\|\|\|\|\|\|\|\|\|\|\|\|\|\|\|\|\|\|\|\|\|\|\|\|\|\|\|\|\|\|\|\|\| | |
| v.5 | 870 | ctgaccgtcatcagcaaaggctgcagcttgaactgcgtggatgactcaca | 919 |
| v.2 | 280 | ggactactacgtgggcaagaagaacatcacgtgctgtgacaccgacttgt | 329 |
| | | \|\|\|\|\|\|\|\|\|\|\|\|\|\|\|\|\|\|\|\|\|\|\|\|\|\|\|\|\|\|\|\|\|\|\|\|\|\|\|\|\|\|\|\|\|\|\|\|\|\| | |
| v.5 | 920 | ggactactacgtgggcaagaagaacatcacgtgctgtgacaccgacttgt | 969 |
| v.2 | 330 | gcaacgccagcggggcccatgccctgcagccggctgccgccatccttgcg | 379 |
| | | \|\|\|\|\|\|\|\|\|\|\|\|\|\|\|\|\|\|\|\|\|\|\|\|\|\|\|\|\|\|\|\|\|\|\|\|\|\|\|\|\|\|\|\|\|\|\|\|\|\| | |
| v.5 | 970 | gcaacgccagcggggcccatgccctgcagccggctgccgccatccttgcg | 1019 |
| v.2 | 380 | ctgctccctgcactcggcctgctgctctggggacccggccagctataggc | 429 |
| | | \|\|\|\|\|\|\|\|\|\|\|\|\|\|\|\|\|\|\|\|\|\|\|\|\|\|\|\|\|\|\|\|\|\|\|\|\|\|\|\|\|\|\|\|\|\|\|\|\|\| | |
| v.5 | 1020 | ctgctccctgcactcggcctgctgctctggggacccggccagctataggc | 1069 |
| v.2 | 430 | tctggggggccccgctgcagcccacactgggtgtggtgccccaggcctct | 479 |
| | | \|\|\|\|\|\|\|\|\|\|\|\|\|\|\|\|\|\|\|\|\|\|\|\|\|\|\|\|\|\|\|\|\|\|\|\|\|\|\|\|\|\|\|\|\|\|\|\|\|\| | |
| v.5 | 1070 | tctggggggccccgctgcagcccacactgggtgtggtgccccaggcctct | 1119 |
| v.2 | 480 | gtgccactcctcacacacccggcccagtgggagcctgtcctggttcctga | 529 |
| | | \|\|\|\|\|\|\|\|\|\|\|\|\|\|\|\|\|\|\|\|\|\|\|\|\|\|\|\|\|\|\|\|\|\|\|\|\|\|\|\|\|\|\|\|\|\|\|\|\|\| | |
| v.5 | 1120 | gtgccactcctcacacacccggcccagtgggagcctgtcctggttcctga | 1169 |
| v.2 | 530 | ggcacatcctaacgcaagtctgaccatgtatgtctgcgcccctgtccccc | 579 |
| | | \|\|\|\|\|\|\|\|\|\|\|\|\|\|\|\|\|\|\|\|\|\|\|\|\|\|\|\|\|\|\|\|\|\|\|\|\|\|\|\|\|\|\|\|\|\|\|\|\|\| | |
| v.5 | 1170 | ggcacatcctaacgcaagtctgaccatgtatgtctgcgcccctgtccccc | 1219 |
| v.2 | 580 | accctgaccctcccatggccctctccaggactcccacccggcagatcggc | 629 |
| | | \|\|\|\|\|\|\|\|\|\|\|\|\|\|\|\|\|\|\|\|\|\|\|\|\|\|\|\|\|\|\|\|\|\|\|\|\|\|\|\|\|\|\|\|\|\|\|\|\|\| | |
| v.5 | 1220 | accctgaccctcccatggccctctccaggactcccacccggcagatcggc | 1269 |
| v.2 | 630 | tctattgacacagatccgcctgcagatggcccctccaaccctctctgctg | 679 |
| | | \|\|\|\|\|\|\|\|\|\|\|\|\|\|\|\|\|\|\|\|\|\|\|\|\|\|\|\|\|\|\|\|\|\|\|\|\|\|\|\|\|\|\|\|\|\|\|\|\|\| | |
| v.5 | 1270 | tctattgacacagatccgcctgcagatggcccctccaaccctctctgctg | 1319 |
| v.2 | 680 | ctgtttccatggcccagcattctccacccttaaccctgtgctcaggcacc | 729 |
| | | \|\|\|\|\|\|\|\|\|\|\|\|\|\|\|\|\|\|\|\|\|\|\|\|\|\|\|\|\|\|\|\|\|\|\|\|\|\|\|\|\|\|\|\|\|\|\|\|\|\| | |
| v.5 | 1320 | ctgtttccatggcccagcattctccacccttaaccctgtgctcaggcacc | 1369 |
| v.2 | 730 | tcttcccccaggaagccttccctgcccaccccatctatgacttgagccag | 779 |
| | | \|\|\|\|\|\|\|\|\|\|\|\|\|\|\|\|\|\|\|\|\|\|\|\|\|\|\|\|\|\|\|\|\|\|\|\|\|\|\|\|\|\|\|\|\|\|\|\|\|\| | |
| v.5 | 1370 | tcttcccccaggaagccttccctgcccaccccatctatgacttgagccag | 1419 |
| v.2 | 780 | gtctggtccgtggtgtcccccgcacccagcaggggacaggcactcaggag | 829 |
| | | \|\|\|\|\|\|\|\|\|\|\|\|\|\|\|\|\|\|\|\|\|\|\|\|\|\|\|\|\|\|\|\|\|\|\|\|\|\|\|\|\|\|\|\|\|\|\|\|\|\| | |
| v.5 | 1420 | gtctggtccgtggtgtcccccgcacccagcaggggacaggcactcaggag | 1469 |
| v.2 | 830 | ggcccggtaaaggctgagatgaagtggactgagtagaactggaggacagg | 879 |
| | | \|\|\|\|\|\|\|\|\|\|\|\|\|\|\|\|\|\|\|\|\|\|\|\|\|\|\|\|\|\|\|\|\|\|\|\|\|\|\|\|\|\|\|\|\|\|\|\|\|\| | |
| v.5 | 1470 | ggcccggtaaaggctgagatgaagtggactgagtagaactggaggacagg | 1519 |
| v.2 | 880 | agtcgacgtgagttcctgggagtctccagagatggggcctggaggcctgg | 929 |
| | | \|\|\|\|\|\|\|\|\|\|\|\|\|\|\|\|\|\|\|\|\|\|\|\|\|\|\|\|\|\|\|\|\|\|\|\|\|\|\|\|\|\|\|\|\|\|\|\|\|\| | |
| v.5 | 1520 | agtcgacgtgagttcctgggagtctccagagatggggcctggaggcctgg | 1569 |
| v.2 | 930 | aggaaggggccaggcctcacattcgtggggctccctgaatggcagcctca | 979 |
| | | \|\|\|\|\|\|\|\|\|\|\|\|\|\|\|\|\|\|\|\|\|\|\|\|\|\|\|\|\|\|\|\|\|\|\|\|\|\|\|\|\|\|\|\|\|\|\|\|\|\| | |
| v.5 | 1570 | aggaaggggccaggcctcacattcgtggggctccctgaatggcagcctca | 1619 |
| v.2 | 980 | gcacagcgtaggcccttaataaacacctgttggataagcca | 1020 |
| | | \|\|\|\|\|\|\|\|\|\|\|\|\|\|\|\|\|\|\|\|\|\|\|\|\|\|\|\|\|\|\|\|\|\|\|\|\|\|\|\|\| | |
| v.5 | 1620 | gcacagcgtaggcccttaataaacacctgttggataagcca | 1660 |

[1441] TABLE LIV(d)
Peptide sequences of protein coded by PSCA v.5 (SEQ ID NO:6544)

| | | | | | | |
|---|---|---|---|---|---|---|
| MTHRTTTWAR | RTSRAVTPTC | ATPAGPMPCS | RLPPSLRCSL | HSACCSGDPA | SYRLWGAPLQ | 60 |
| PTLGVVPQAS | VPLLTHPAQW | EPVLVPEAHP | NASLTMYVCA | PVPHPDPPMA | LSRTPTRQIG | 120 |
| SIDTDPPADG | PSNPLCCCFH | GPAFSTLNPV | LRHLFPQEAF | PAHPIYDLSQ | VWSVVSPAPS | 180 |
| RGQALRRAR | | | | | | |

[1442] TABLE LV(d)
Amino acid sequence alignment of PSCA v.2 and PSCA v.5
NO SIGNIFICANT HOMOLOGY

[1443] TABLE LVI
SNP and codon changes in PSCA v.2 and v.4

| | V.2 | | AA* | AA | V.4 | AA | | |
|---|---|---|---|---|---|---|---|---|
| Variant | position | SNP | change | position | position | change | AA position | Variant |
| V.6 | 57 | t/c | M/—** | 1 | Not in v.4 | | | |
| V.7 | 367 | c/t | A/A | 104 | 521 | P/L | 33 | v.19 |
| V.8 | 424 | a/c | L/L | 123 | 578 | Y/S | 52 | v.20 |
| V.9 | 495 | c/g | | | 649 | H/D | 76 | v.21 |
| V.10 | 499 | c/t | | | 653 | P/L | 77 | v.22 |
| V.11 | 563 | c/t | | | 717 | V/V | 98 | v.23 |
| V.12 | 567 | g/a | | | 721 | A/T | 100 | v.24 |
| V.13 | 627 | g/a | | | 781 | G/S | 120 | v.25 |
| V.14 | 634 | t/g | | | 788 | I/S | 122 | v.26 |
| V.15 | 835 | g/a | | | 989 | R/Q | 189 | v.27 |
| V.16 | 847 | g/a | | | 1001 | | | v.28 |
| V.17 | 878 | g/a | | | 1032 | | | v.29 |
| V.18 | 978 | c/g | | | 1132 | | | v.30 |

*AA: amino acid
**—: No amino acid encoded.

The application's sequence listing, which the Patent Office published only in electronic form, follows.

SEQUENCE LISTING (6556 sequences)

SEQ ID NO: 1 - protein, 14 aa, Homo sapiens
QYIKANSKFIGITE

SEQ ID NO: 2 - protein, 21 aa, Homo sapiens
DIEKKIAKMEKASSVFNVVNS

SEQ ID NO: 3 - protein, 16 aa, Homo sapiens
GAVDSILGGVATYGAA

SEQ ID NO: 4 - protein, 12 aa, Homo sapiens
  MOD_RES 1, 12: Xaa = D-alanine or L-alanine
  MOD_RES 3: Xaa= cyclohexylalanine, phenylalanine, or tyrosine
XKXVAAWTLKAX

SEQ ID NO: 5 - protein, 6 aa, Homo sapiens
TILVMS

SEQ ID NO: 6 - protein, 7 aa, Homo sapiens
LIVMATQ

SEQ ID NO: 7 - protein, 7 aa, Homo sapiens
VSMATLI

SEQ ID NO: 8 - protein, 8 aa, Homo sapiens
YFWIVLMT

SEQ ID NO: 9 - protein, 6 aa, Homo sapiens
QLIVMP

SEQ ID NO: 10 - protein, 7 aa, Homo sapiens
LMVQIAT

SEQ ID NO: 11 - protein, 11 aa, Homo sapiens
LMVISATFCGD

SEQ ID NO: 12 - protein, 12 aa, Homo sapiens
VTMLISAGNCDF

SEQ ID NO: 13 - protein, 4 aa, Homo sapiens
YFWM

SEQ ID NO: 14 - protein, 7 aa, Homo sapiens
MVTALIS

SEQ ID NO: 15 - protein, 8 aa, Homo sapiens
MVALFIST

SEQ ID NO: 16 - protein, 7 aa, Homo sapiens
AVTMSLI

SEQ ID NO: 17 - protein, 4 aa, Homo sapiens
DEAS

SEQ ID NO: 18 - protein, 6 aa, Homo sapiens
IVMATL

SEQ ID NO: 19 - protein, 6 aa, Homo sapiens
FIYWLM

SEQ ID NO: 20 - protein, 8 aa, Homo sapiens
VILFMWYA

SEQ ID NO: 21 - protein, 8 aa, Homo sapiens
FYLWMIVA

SEQ ID NO: 22 - protein, 8 aa, Homo sapiens
FWYLIMVA

SEQ ID NO: 23 - protein, 8 aa, Homo sapiens
FWYLIVMA

SEQ ID NO: 24 - protein, 8 aa, Homo sapiens
FWYMIVLA

SEQ ID NO: 25 - protein, 6 aa, Homo sapiens
VLIMAT

SEQ ID NO: 26 - protein, 6 aa, Homo sapiens
KYRHFA

SEQ ID NO: 27 - protein, 4 aa, Homo sapiens
KRYH

SEQ ID NO: 28 - protein, 4 aa, Homo sapiens
FLIW

SEQ ID NO: 29 - protein, 8 aa, Homo sapiens
LMFWYAIV

SEQ ID NO: 30 - protein, 8 aa, Homo sapiens
LMFWYIVA

SEQ ID NO: 31 - protein, 8 aa, Homo sapiens
LIVFWYAM

SEQ ID NO: 32 - protein, 8 aa, Homo sapiens
IMFWYALV

SEQ ID NO: 33 - protein, 9 aa, Homo sapiens
ATIVLMFWY

SEQ ID NO: 34 - protein, 7 aa, Homo sapiens
FMYLIVW

SEQ ID NO: 35 - protein, 9 aa, Homo sapiens
VSTCPALIM

SEQ ID NO: 36 - protein, 7 aa, Homo sapiens
MFLIVWY

SEQ ID NO: 37 - protein, 4 aa, Homo sapiens
PAMQ

SEQ ID NO: 38 - protein, 9 aa, Homo sapiens
VMATSPLIC

SEQ ID NO: 39 - protein, 7 aa, Homo sapiens
MFLIVWY

SEQ ID NO: 40 - protein, 9 aa, Homo sapiens
IVMSACTPL

SEQ ID NO: 41 - protein, 6 aa, Homo sapiens
LIVMFY

SEQ ID NO: 42 - protein, 7 aa, Homo sapiens
LIVMFAY

SEQ ID NO: 43 - protein, 6 aa, Homo sapiens
DNQEST

SEQ ID NO: 44 - protein, 7 aa, Homo sapiens
MFLIVWY

SEQ ID NO: 45 - protein, 9 aa, Homo sapiens
VMSTACPLI

SEQ ID NO: 46 - protein, 6 aa, Homo sapiens
TILVMS

SEQ ID NO: 47 - protein, 7 aa, Homo sapiens
LIVMATQ

SEQ ID NO: 48 - protein, 6 aa, Homo sapiens
LIVMAT

SEQ ID NO: 49 - protein, 7 aa, Homo sapiens
VSMATLI

SEQ ID NO: 50 - protein, 8 aa, Homo sapiens
YFWIVLMT

SEQ ID NO: 51 - protein, 6 aa, Homo sapiens
FIYWLM

SEQ ID NO: 52 - protein, 8 aa, Homo sapiens
VILFMWYA

SEQ ID NO: 53 - protein, 8 aa, Homo sapiens
FYLWMIVA

SEQ ID NO: 54 - protein, 8 aa, Homo sapiens
FWYLIMVA

SEQ ID NO: 55 - protein, 8 aa, Homo sapiens
FWYLIVMA

SEQ ID NO: 56 - protein, 6 aa, Homo sapiens
QLIVMP

SEQ ID NO: 57 - protein, 8 aa, Homo sapiens
FWYMIVLA

SEQ ID NO: 58 - protein, 4 aa, Homo sapiens
GFYW

SEQ ID NO: 59 - protein, 8 aa, Homo sapiens
RHKLIVMP

SEQ ID NO: 60 - protein, 4 aa, Homo sapiens
GRHK

SEQ ID NO: 61 - protein, 8 aa, Homo sapiens
ASTCLIVM

SEQ ID NO: 62 - protein, 4 aa, Homo sapiens
GSTC

SEQ ID NO: 63 - protein, 4 aa, Homo sapiens
ASTC

SEQ ID NO: 64 - protein, 4 aa, Homo sapiens
LIVM

SEQ ID NO: 65 - protein, 9 aa, Homo sapiens
RHKDEPYFW

SEQ ID NO: 66 - protein, 5 aa, Homo sapiens
DEAQN

SEQ ID NO: 67 - protein, 5 aa, Homo sapiens
YFWQN

SEQ ID NO: 68 - protein, 5 aa, Homo sapiens
PASTC

SEQ ID NO: 69 - protein, 8 aa, Homo sapiens
RHKGLIVM

SEQ ID NO: 70 - protein, 6 aa, Homo sapiens
RHKYFW

SEQ ID NO: 71 - protein, 7 aa, Homo sapiens
STCLIVM

SEQ ID NO: 72 - protein, 4 aa, Homo sapiens
DEAS

SEQ ID NO: 73 - protein, 9 aa, Homo sapiens
RHKDEPYFW

SEQ ID NO: 74 - protein, 4 aa, Homo sapiens
PRHK

SEQ ID NO: 75 - protein, 7 aa, Homo sapiens
LMIVQAT

SEQ ID NO: 76 - protein, 6 aa, Homo sapiens
VLIMAT

SEQ ID NO: 77 - protein, 5 aa, Homo sapiens
DERKH

SEQ ID NO: 78 - protein, 4 aa, Homo sapiens
AYFW

SEQ ID NO: 79 - protein, 7 aa, Homo sapiens
LMIVQAT

SEQ ID NO: 80 - protein, 4 aa, Homo sapiens
LVIM

SEQ ID NO: 81 - protein, 7 aa, Homo sapiens
FYWLVIM

SEQ ID NO: 82 - protein, 4 aa, Homo sapiens
RKHA

SEQ ID NO: 83 - protein, 8 aa, Homo sapiens
DERKHRKH

SEQ ID NO: 84 - protein, 11 aa, Homo sapiens
LMVISATFCGD

SEQ ID NO: 85 - protein, 7 aa, Homo sapiens
PRHKYFW

SEQ ID NO: 86 - protein, 6 aa, Homo sapiens
KYRHFA

SEQ ID NO: 87 - protein, 12 aa, Homo sapiens
VTLMISAGNCDF

SEQ ID NO: 88 - protein, 4 aa, Homo sapiens
KRYH

SEQ ID NO: 89 - protein, 6 aa, Homo sapiens
YFWRHK

SEQ ID NO: 90 - protein, 4 aa, Homo sapiens
YFWM

SEQ ID NO: 91 - protein, 4 aa, Homo sapiens
FLIW

SEQ ID NO: 92 - protein, 6 aa, Homo sapiens
DERHKG

SEQ ID NO: 93 - protein, 4 aa, Homo sapiens
YFWM

SEQ ID NO: 94 - protein, 4 aa, Homo sapiens
YFWP

SEQ ID NO: 95 - protein, 4 aa, Homo sapiens
FLIW

SEQ ID NO: 96 - protein, 7 aa, Homo sapiens
MVTALIS

SEQ ID NO: 97 - protein, 8 aa, Homo sapiens
MVALFIST

SEQ ID NO: 98 - protein, 4 aa, Homo sapiens
AYFW

SEQ ID NO: 99 - protein, 6 aa, Homo sapiens
YFWSTC

SEQ ID NO: 100 - protein, 7 aa, Homo sapiens
AVTMSLI

SEQ ID NO: 101 - protein, 7 aa, Homo sapiens
YFWLIVM

SEQ ID NO: 102 - protein, 6 aa, Homo sapiens
RHKFWY

SEQ ID NO: 103 - protein, 8 aa, Homo sapiens
LMFWYAIV

SEQ ID NO: 104 - protein, 5 aa, Homo sapiens
DEQNP

SEQ ID NO: 105 - protein, 7 aa, Homo sapiens
FWYLIVM

SEQ ID NO: 106 - protein, 8 aa, Homo sapiens
LMFWYIVA

SEQ ID NO: 107 - protein, 4 aa, Homo sapiens
GFYW

SEQ ID NO: 108 - protein, 8 aa, Homo sapiens
RHKLIVMP

SEQ ID NO: 109 - protein, 4 aa, Homo sapiens
DEQN

SEQ ID NO: 110 - protein, 4 aa, Homo sapiens
GRHK

SEQ ID NO: 111 - protein, 8 aa, Homo sapiens
ASTCLIVM

SEQ ID NO: 112 - protein, 4 aa, Homo sapiens
DEAS

SEQ ID NO: 113 - protein, 4 aa, Homo sapiens
ASTC

SEQ ID NO: 114 - protein, 4 aa, Homo sapiens
LIVM

SEQ ID NO: 115 - protein, 9 aa, Homo sapiens
RHKDEPYFW

SEQ ID NO: 116 - protein, 7 aa, Homo sapiens
LIVMFWY

SEQ ID NO: 117 - protein, 8 aa, Homo sapiens
LIVFWYAM

SEQ ID NO: 118 - protein, 6 aa, Homo sapiens
AGPDER

SEQ ID NO: 119 - protein, 5 aa, Homo sapiens
HKSTC

SEQ ID NO: 120 - protein, 4 aa, Homo sapiens
DEQN

SEQ ID NO: 121 - protein, 7 aa, Homo sapiens
LIVMFWY

SEQ ID NO: 122 - protein, 10 aa, Homo sapiens
LIVMFWYFWY

SEQ ID NO: 123 - protein, 8 aa, Homo sapiens
IMFWYALV

SEQ ID NO: 124 - protein, 5 aa, Homo sapiens
AGPQN

SEQ ID NO: 125 - protein, 5 aa, Homo sapiens
RHKQN

SEQ ID NO: 126 - protein, 7 aa, Homo sapiens
FWYLIVM

SEQ ID NO: 127 - protein, 4 aa, Homo sapiens
LIVM

SEQ ID NO: 128 - protein, 5 aa, Homo sapiens
ALIVM

SEQ ID NO: 129 - protein, 5 aa, Homo sapiens
FWYAP

SEQ ID NO: 130 - protein, 9 aa, Homo sapiens
ATIVLMFWY

SEQ ID NO: 131 - protein, 6 aa, Homo sapiens
GPQNDE

SEQ ID NO: 132 - protein, 6 aa, Homo sapiens
GDESTC

SEQ ID NO: 133 - protein, 5 aa, Homo sapiens
RHKDE

SEQ ID NO: 134 - protein, 5 aa, Homo sapiens
QNDGE

SEQ ID NO: 135 - protein, 8 aa, Homo sapiens
AILMVFWY

SEQ ID NO: 136 - protein, 7 aa, Homo sapiens
AILMVST

SEQ ID NO: 137 - protein, 6 aa, Homo sapiens
AILMVT

SEQ ID NO: 138 - protein, 6 aa, Homo sapiens
AILMVT

SEQ ID NO: 139 - protein, 8 aa, Homo sapiens
YFWIVLMT

SEQ ID NO: 140 - protein, 6 aa, Homo sapiens
FIYWLM

SEQ ID NO: 141 - protein, 8 aa, Homo sapiens
FWYLIMVA

SEQ ID NO: 142 - protein, 6 aa, Homo sapiens
TILVMS

SEQ ID NO: 143 - protein, 6 aa, Homo sapiens
FYLWMI

SEQ ID NO: 144 - protein, 6 aa, Homo sapiens
QLIVMP

SEQ ID NO: 145 - protein, 6 aa, Homo sapiens
FWYMIV

SEQ ID NO: 146 - protein, 6 aa, Homo sapiens
FWYLIV

SEQ ID NO: 147 - protein, 4 aa, Homo sapiens
NASL

SEQ ID NO: 148 - protein, 4 aa, Homo sapiens
RRTS

SEQ ID NO: 149 - protein, 6 aa, Homo sapiens
GSIDTD

SEQ ID NO: 150 - protein, 123 aa, Homo sapiens
MKAVLLALLMAGLALQPGTALLCYSCKAQVSNEDCLQVENCTQLGEQCWTARIRAVGLLTVISKGCSLNCVDDSQDYYVGKKNITCCDTDLCNASGAHALQPAAAILALLPALGLLLWGPGQL

SEQ ID NO: 151 - protein, 190 aa, Homo sapiens [sequence omitted]

SEQ ID NO: 152 - protein, 17 aa, Homo sapiens
GPMPCSRLLPSLRCSLH

SEQ ID NO: 153 - protein, 19 aa, Homo sapiens
AGPMPCSRLLPSLRCSLHS

SEQ ID NO: 154 - protein, 29 aa, Homo sapiens
TCATPAGPMPCSRLLPSLRCSLHSACCSG

SEQ ID NO: 155 - protein, 17 aa, Homo sapiens
CCSGDPASSRLWGAPLQ

SEQ ID NO: 156 - protein, 19 aa, Homo sapiens
ACCSGDPASSRLWGAPLQP

SEQ ID NO: 157 - protein, 29 aa, Homo sapiens
CSLHSACCSGDPASSRLWGAPLQPTLGVV

SEQ ID NO: 158 - protein, 17 aa, Homo sapiens
QASVPLLTDPAQWEPVL

SEQ ID NO: 159 - protein, 19 aa, Homo sapiens
PQASVPLLTDPAQWEPVLV

SEQ ID NO: 160 - protein, 29 aa, Homo sapiens
TLGVVPQASVPLLTDPAQWEPVLVPEAHP

SEQ ID NO: 161 - protein, 16 aa, Homo sapiens
ASVPLLTDLAQWEPVL

SEQ ID NO: 162 - protein, 18 aa, Homo sapiens
QASVPLLTDLAQWEPVLV

SEQ ID NO: 163 - protein, 28 aa, Homo sapiens
LGVVPQASVPLLTDLAQWEPVLVPEAHP

SEQ ID NO: 164 - protein, 17 aa, Homo sapiens
ASVPLLTHLAQWEPVLV

SEQ ID NO: 165 - protein, 19 aa, Homo sapiens
QASVPLLTHLAQWEPVLVP

SEQ ID NO: 166 - protein, 29 aa, Homo sapiens
LGVVPQASVPLLTHLAQWEPVLVPEAHPN

SEQ ID NO: 167 - protein, 16 aa, Homo sapiens
ASLTMYVCTPVPHPDP

SEQ ID NO: 168 - protein, 19 aa, Homo sapiens
NASLTMYVCTPVPHPDPPM

SEQ ID NO: 169 - protein, 29 aa, Homo sapiens
PEAHPNASLTMYVCTPVPHPDPPMALSRT

SEQ ID NO: 170 - protein, 17 aa, Homo sapiens
SRTPTRQISSIDTDPPA

SEQ ID NO: 171 - protein, 19 aa, Homo sapiens
LSRTPTRQISSIDTDPPAD

SEQ ID NO: 172 - protein, 29 aa, Homo sapiens
DPPMALSRTPTRQISSIDTDPPADGPSNP

SEQ ID NO: 173 - protein, 15 aa, Homo sapiens
TPTRQISSSDTDPPA

SEQ ID NO: 174 - protein, 17 aa, Homo sapiens
RTPTRQISSSDTDPPAD

SEQ ID NO: 175 - protein, 27 aa, Homo sapiens
PMALSRTPTRQISSSDTDPPADGPSNP

SEQ ID NO: 176 - protein, 17 aa, Homo sapiens
TPTRQIGSSDTDPPADG

SEQ ID NO: 177 - protein, 19 aa, Homo sapiens
RTPTRQIGSSDTDPPADGP

SEQ ID NO: 178 - protein, 29 aa, Homo sapiens
PMALSRTPTRQIGSSDTDPPADGPSNPLC

SEQ ID NO: 179 - protein, 9 aa, Homo sapiens
RGQALRRAQ

SEQ ID NO: 180 - protein, 10 aa, Homo sapiens
SRGQALRRAQ

SEQ ID NO: 181 - protein, 15 aa, Homo sapiens
VSPAPSRGQALRRAQ

SEQ ID NO: 182 - protein, 9 aa, Homo sapiens
CVDDSQDYY

SEQ ID NO: 183 - protein, 9 aa, Homo sapiens
DTDLCNASG

SEQ ID NO: 184 - protein, 9 aa, Homo sapiens
LGEQCWTAR

SEQ ID NO: 185 - protein, 9 aa, Homo sapiens
SQDYYVGKK

SEQ ID NO: 186 - protein, 9 aa, Homo sapiens
QVENCTQLG

SEQ ID NO: 187 - protein, 9 aa, Homo sapiens
QPGTALLCY

SEQ ID NO: 188 - protein, 9 aa, Homo sapiens
DSQDYYVGK

SEQ ID NO: 189 - protein, 9 aa, Homo sapiens
NCVDDSQDY

SEQ ID NO: 190 - protein, 9 aa, Homo sapiens
CCDTDLCNA

SEQ ID NO: 191 - protein, 9 aa, Homo sapiens
VGLLTVISK

SEQ ID NO: 192 - protein, 9 aa, Homo sapiens
ALQPAAAIL

SEQ ID NO: 193 - protein, 9 aa, Homo sapiens
ALQPGTALL

SEQ ID NO: 194 - protein, 9 aa, Homo sapiens
TALLCYSCK

SEQ ID NO: 195 - protein, 9 aa, Homo sapiens
ALLPALGLL

SEQ ID NO: 196 - protein, 9 aa, Homo sapiens
VSNEDCLQV

SEQ ID NO: 197 - protein, 9 aa, Homo sapiens
TCCDTDLCN

SEQ ID NO: 198 - protein, 9 aa, Homo sapiens
LALLPALGL

SEQ ID NO: 199 - protein, 9 aa, Homo sapiens
KAVLLALLM

SEQ ID NO: 200 - protein, 9 aa, Homo sapiens
AVLLALLMA

SEQ ID NO: 201 - protein, 9 aa, Homo sapiens
AAILALLPA

SEQ ID NO: 202 - protein, 9 aa, Homo sapiens
VDDSQDYYV

SEQ ID NO: 203 - protein, 9 aa, Homo sapiens
GTALLCYSC

SEQ ID NO: 204 - protein, 9 aa, Homo sapiens
VLLALLMAG

SEQ ID NO: 205 - protein, 9 aa, Homo sapiens
NEDCLQVEN

SEQ ID NO: 206 - protein, 9 aa, Homo sapiens
ALLMAGLAL

SEQ ID NO: 207 - protein, 9 aa, Homo sapiens
LLPALGLLL

SEQ ID NO: 208 - protein, 9 aa, Homo sapiens
ITCCDTDLC

SEQ ID NO: 209 - protein, 9 aa, Homo sapiens
CTQLGEQCW

SEQ ID NO: 210 - protein, 9 aa, Homo sapiens
LTVISKGCS

SEQ ID NO: 211 - protein, 9 aa, Homo sapiens
SNEDCLQVE

SEQ ID NO: 212 - protein, 9 aa, Homo sapiens
LCYSCKAQV

SEQ ID NO: 213 - protein, 9 aa, Homo sapiens
ILALLPALG

SEQ ID NO: 214 - protein, 9 aa, Homo sapiens
LLMAGLALQ

SEQ ID NO: 215 - protein, 9 aa, Homo sapiens
LCNASGAHA

SEQ ID NO: 216 - protein, 9 aa, Homo sapiens
LLALLMAGL

SEQ ID NO: 217 - protein, 9 aa, Homo sapiens
HALQPAAAI

SEQ ID NO: 218 - protein, 9 aa, Homo sapiens
AILALLPAL

SEQ ID NO: 219 - protein, 9 aa, Homo sapiens
GAHALQPAA

SEQ ID NO: 220 - protein, 9 aa, Homo sapiens
NASGAHALQ

SEQ ID NO: 221 - protein, 9 aa, Homo sapiens
AVGLLTVIS

SEQ ID NO: 222 - protein, 9 aa, Homo sapiens
GLLLWGPGQ

SEQ ID NO: 223 - protein, 9 aa, Homo sapiens
CSLNCVDDS

SEQ ID NO: 224 - protein, 9 aa, Homo sapiens
EQCWTARIR

SEQ ID NO: 225 - protein, 9 aa, Homo sapiens
QPAAAILAL

SEQ ID NO: 226 - protein, 9 aa, Homo sapiens
LPALGLLLW

SEQ ID NO: 227 - protein, 9 aa, Homo sapiens
LLTVISKGC

SEQ ID NO: 228 - protein, 9 aa, Homo sapiens
LLLWGPGQL

SEQ ID NO: 229 - protein, 9 aa, Homo sapiens
LALQPGTAL

SEQ ID NO: 230 - protein, 9 aa, Homo sapiens
KAQVSNEDC

SEQ ID NO: 231 - protein, 9 aa, Homo sapiens
ALLCYSCKA

SEQ ID NO: 232 - protein, 9 aa, Homo sapiens
CLQVENCTQ

SEQ ID NO: 233 - protein, 9 aa, Homo sapiens
QLGEQCWTA

SEQ ID NO: 234 - protein, 9 aa, Homo sapiens
QVSNEDCLQ

SEQ ID NO: 235 - protein, 9 aa, Homo sapiens
DCLQVENCT

SEQ ID NO: 236 - protein, 9 aa, Homo sapiens
RAVGLLTVI

SEQ ID NO: 237 - protein, 9 aa, Homo sapiens
NCTQLGEQC

SEQ ID NO: 238 - protein, 9 aa, Homo sapiens
GLALQPGTA

SEQ ID NO: 239 - protein, 9 aa, Homo sapiens
NITCCDTDL

SEQ ID NO: 240 - protein, 9 aa, Homo sapiens
LALLMAGLA

SEQ ID NO: 241 - protein, 9 aa, Homo sapiens
LLCYSCKAQ

SEQ ID NO: 242 - protein, 9 aa, Homo sapiens
DLCNASGAH

SEQ ID NO: 243 - protein, 9 aa, Homo sapiens
TVISKGCSL

SEQ ID NO: 244 - protein, 9 aa, Homo sapiens
SLNCVDDSQ

SEQ ID NO: 245 - protein, 9 aa, Homo sapiens
MAGLALQPG

SEQ ID NO: 246 - protein, 9 aa, Homo sapiens
GLLTVISKG

SEQ ID NO: 247 - protein, 9 aa, Homo sapiens
ISKGCSLNC

SEQ ID NO: 248 - protein, 9 aa, Homo sapiens
ASGAHALQP

SEQ ID NO: 249 - protein, 9 aa, Homo sapiens
LQPAAAILA

SEQ ID NO: 250 - protein, 9 aa, Homo sapiens
LQPGTALLC

SEQ ID NO: 251 - protein, 9 aa, Homo sapiens
QCWTARIRA

SEQ ID NO: 252 - protein, 9 aa, Homo sapiens
RIRAVGLLT

SEQ ID NO: 253 - protein, 9 aa, Homo sapiens
YVGKKNITC

SEQ ID NO: 254 - protein, 9 aa, Homo sapiens
PALGLLLWG

SEQ ID NO: 255 - protein, 9 aa, Homo sapiens
AGLALQPGT

SEQ ID NO: 256 - protein, 9 aa, Homo sapiens
WTARIRAVG

SEQ ID NO: 257 - protein, 9 aa, Homo sapiens
AAAILALLP

SEQ ID NO: 258 - protein, 9 aa, Homo sapiens
YSCKAQVSN

SEQ ID NO: 259 - protein, 9 aa, Homo sapiens
ENCTQLGEQ

SEQ ID NO: 260 - protein, 9 aa, Homo sapiens
LGLLLWGPG

SEQ ID NO: 261 - protein, 9 aa, Homo sapiens
SGAHALQPA

SEQ ID NO: 262 - protein, 9 aa, Homo sapiens
LMAGLALQP

SEQ ID NO: 263 - protein, 9 aa, Homo sapiens
CNASGAHAL

SEQ ID NO: 264 - protein, 9 aa, Homo sapiens
IRAVGLLTV

SEQ ID NO: 265 - protein, 9 aa, Homo sapiens
TARIRAVGL

SEQ ID NO: 266 - protein, 9 aa, Homo sapiens
PAAAILALL

SEQ ID NO: 267 - protein, 9 aa, Homo sapiens
GCSLNCVDD

SEQ ID NO: 268 - protein, 9 aa, Homo sapiens
TQLGEQCWT

SEQ ID NO: 269 - protein, 9 aa, Homo sapiens
AQVSNEDCL

SEQ ID NO: 270 - protein, 9 aa, Homo sapiens
LQVENCTQL

SEQ ID NO: 271 - protein, 9 aa, Homo sapiens
ALGLLLWGP

SEQ ID NO: 272 - protein, 9 aa, Homo sapiens
GEQCWTARI

SEQ ID NO: 273 - protein, 9 aa, Homo sapiens
DDSQDYYVG

SEQ ID NO: 274 - protein, 9 aa, Homo sapiens
AHALQPAAA

SEQ ID NO: 275 - protein, 9 aa, Homo sapiens
MKAVLLALL

SEQ ID NO: 276 - protein, 9 aa, Homo sapiens
VISKGCSLN

SEQ ID NO: 277 - protein, 9 aa, Homo sapiens
DYYVGKKNI

SEQ ID NO: 278 - protein, 9 aa, Homo sapiens
CWTARIRAV

SEQ ID NO: 279 - protein, 9 aa, Homo sapiens
EDCLQVENC

SEQ ID NO: 280 - protein, 9 aa, Homo sapiens
KKNITCCDT

SEQ ID NO: 281 - protein, 9 aa, Homo sapiens
TDLCNASGA

SEQ ID NO: 282 - protein, 9 aa, Homo sapiens
EAFPAHPIY

SEQ ID NO: 283 - protein, 9 aa, Homo sapiens
SGDPASYRL

SEQ ID NO: 284 - protein, 9 aa, Homo sapiens
HPDPPMALS

SEQ ID NO: 285 - protein, 9 aa, Homo sapiens
DTDPPADGP

SEQ ID NO: 286 - protein, 9 aa, Homo sapiens
CCSGDPASY

SEQ ID NO: 287 - protein, 9 aa, Homo sapiens
FSTLNPVLR

SEQ ID NO: 288 - protein, 9 aa, Homo sapiens
VPEAHPNAS

SEQ ID NO: 289 - protein, 9 aa, Homo sapiens
MALSRTPTR

SEQ ID NO: 290 - protein, 9 aa, Homo sapiens
CCCFHGPAF

SEQ ID NO: 291 - protein, 9 aa, Homo sapiens
SVVSPAPSR

SEQ ID NO: 292 - protein, 9 aa, Homo sapiens
PSNPLCCCF

SEQ ID NO: 293 - protein, 9 aa, Homo sapiens
CSGDPASYR

SEQ ID NO: 294 - protein, 9 aa, Homo sapiens
HPNASLTMY

SEQ ID NO: 295 - protein, 9 aa, Homo sapiens
ATPAGPMPC

SEQ ID NO: 296 - protein, 9 aa, Homo sapiens
RTPTRQIGS

SEQ ID NO: 297 - protein, 9 aa, Homo sapiens
STLNPVLRH

SEQ ID NO: 298 - protein, 9 aa, Homo sapiens
VLVPEAHPN

SEQ ID NO: 299 - protein, 9 aa, Homo sapiens
RLPPSLRCS

SEQ ID NO: 300 - protein, 9 aa, Homo sapiens
EAHPNASLT

SEQ ID NO: 301 - protein, 9 aa, Homo sapiens
PAGPMPCSR

SEQ ID NO: 302 - protein, 9 aa, Homo sapiens
TLNPVLRHL

SEQ ID NO: 303 - protein, 9 aa, Homo sapiens
VVSPAPSRG

SEQ ID NO: 304 - protein, 9 aa, Homo sapiens
SIDTDPPAD

SEQ ID NO: 305 - protein, 9 aa, Homo sapiens
QWEPVLVPE

SEQ ID NO: 306 - protein, 9 aa, Homo sapiens
IYDLSQVWS

SEQ ID NO: 307 - protein, 9 aa, Homo sapiens
LTMYVCAPV

SEQ ID NO: 308 - protein, 9 aa, Homo sapiens
PADGPSNPL

SEQ ID NO: 309 - protein, 9 aa, Homo sapiens
VPHPDPPMA

SEQ ID NO: 310 - protein, 9 aa, Homo sapiens
WGAPLQPTL

SEQ ID NO: 311 - protein, 9 aa, Homo sapiens
QASVPLLTH

SEQ ID NO: 312 - protein, 9 aa, Homo sapiens
GSIDTDPPA

SEQ ID NO: 313 - protein, 9 aa, Homo sapiens
ASLTMYVCA

SEQ ID NO: 314 - protein, 9 aa, Homo sapiens
LSQVWSVVS

SEQ ID NO: 315 - protein, 9 aa, Homo sapiens
WSVVSPAPS

SEQ ID NO: 316 - protein, 9 aa, Homo sapiens
PDPPMALSR

SEQ ID NO: 317 - protein, 9 aa, Homo sapiens
SRLPPSLRC

SEQ ID NO: 318 - protein, 9 aa, Homo sapiens
LNPVLRHLF

SEQ ID NO: 319 - protein, 9 aa, Homo sapiens
RGQALRRAR

SEQ ID NO: 320 - protein, 9 aa, Homo sapiens
SPAPSRGQA

SEQ ID NO: 321 - protein, 9 aa, Homo sapiens
VTPTCATPA

SEQ ID NO: 322 - protein, 9 aa, Homo sapiens
LTHPAQWEP

SEQ ID NO: 323 - protein, 9 aa, Homo sapiens
RTTTWARRT

SEQ ID NO: 324 - protein, 9 aa, Homo sapiens
TTWARRTSR

SEQ ID NO: 325 - protein, 9 aa, Homo sapiens
TTTWARRTS

SEQ ID NO: 326 - protein, 9 aa, Homo sapiens
NASLTMYVC

SEQ ID NO: 327 - protein, 9 aa, Homo sapiens
ACCSGDPAS

SEQ ID NO: 328 - protein, 9 aa, Homo sapiens
RCSLHSACC

SEQ ID NO: 329 - protein, 9 aa, Homo sapiens
AVTPTCATP

SEQ ID NO: 330 - protein, 9 aa, Homo sapiens
CATPAGPMP

SEQ ID NO: 331 - protein, 9 aa, Homo sapiens
LVPEAHPNA

SEQ ID NO: 332 - protein, 9 aa, Homo sapiens
VVPQASVPL

SEQ ID NO: 333 - protein, 9 aa, Homo sapiens
CCFHGPAFS

SEQ ID NO: 334 - protein, 9 aa, Homo sapiens
HLFPQEAFP

SEQ ID NO: 335 - protein, 9 aa, Homo sapiens
CSRLPPSLR

SEQ ID NO: 336 - protein, 9 aa, Homo sapiens
ASVPLLTHP

SEQ ID NO: 337 - protein, 9 aa, Homo sapiens
VSPAPSRGQ

SEQ ID NO: 338 - protein, 9 aa, Homo sapiens
CSLHSACCS

SEQ ID NO: 339 - protein, 9 aa, Homo sapiens
DGPSNPLCC

SEQ ID NO: 340 - protein, 9 aa, Homo sapiens
NPLCCCFHG

SEQ ID NO: 341 - protein, 9 aa, Homo sapiens
DPASYRLWG

SEQ ID NO: 342 - protein, 9 aa, Homo sapiens
APLQPTLGV

SEQ ID NO: 343 - protein, 9 aa, Homo sapiens
PAHPIYDLS

SEQ ID NO: 344 - protein, 9 aa, Homo sapiens
HRTTTWARR

SEQ ID NO: 345 - protein, 9 aa, Homo sapiens
SACCSGDPA

SEQ ID NO: 346 - protein, 9 aa, Homo sapiens
TCATPAGPM

SEQ ID NO: 347 - protein, 9 aa, Homo sapiens
PLQPTLGVV

SEQ ID NO: 348 - protein, 9 aa, Homo sapiens
RAVTPTCAT

SEQ ID NO: 349 - protein, 9 aa, Homo sapiens
GVVPQASVP

SEQ ID NO: 350 - protein, 9 aa, Homo sapiens
LCCCFHGPA

SEQ ID NO: 351 - protein, 9 aa, Homo sapiens
ADGPSNPLC

SEQ ID NO: 352 - protein, 9 aa, Homo sapiens
VCAPVPHPD

SEQ ID NO: 353 - protein, 9 aa, Homo sapiens
GAPLQPTLG

SEQ ID NO: 354 - protein, 9 aa, Homo sapiens
TLGVVPQAS

SEQ ID NO: 355 - protein, 9 aa, Homo sapiens
DLSQVWSVV

SEQ ID NO: 356 - protein, 9 aa, Homo sapiens
SLHSACCSG

SEQ ID NO: 357 - protein, 9 aa, Homo sapiens
SVPLLTHPA

SEQ ID NO: 358 - protein, 9 aa, Homo sapiens
PSRGQALRR

SEQ ID NO: 359 - protein, 9 aa, Homo sapiens
VPQASVPLL

SEQ ID NO: 360 - protein, 9 aa, Homo sapiens
TDPPADGPS

SEQ ID NO: 361 - protein, 9 aa, Homo sapiens
FHGPAFSTL

SEQ ID NO: 362 - protein, 9 aa, Homo sapiens
LGVVPQASV

SEQ ID NO: 363 - protein, 9 aa, Homo sapiens
DPPADGPSN

SEQ ID NO: 364 - protein, 9 aa, Homo sapiens
TPAGPMPCS

SEQ ID NO: 365 - protein, 9 aa, Homo sapiens
HPAQWEPVL

SEQ ID NO: 366 - protein, 9 aa, Homo sapiens
TPTCATPAG

SEQ ID NO: 367 - protein, 9 aa, Homo sapiens
SRTPTRQIG

SEQ ID NO: 368 - protein, 9 aa, Homo sapiens
VPLLTHPAQ

SEQ ID NO: 369 - protein, 9 aa, Homo sapiens
FPAHPIYDL

SEQ ID NO: 370 - protein, 9 aa, Homo sapiens
RHLFPQEAF

SEQ ID NO: 371 - protein, 9 aa, Homo sapiens
QPTLGVVPQ

SEQ ID NO: 372 - protein, 9 aa, Homo sapiens
APSRGQALR

SEQ ID NO: 373 - protein, 9 aa, Homo sapiens
MPCSRLPPS

SEQ ID NO: 374 - protein, 9 aa, Homo sapiens
FPQEAFPAH

SEQ ID NO: 375 - protein, 9 aa, Homo sapiens
PTLGVVPQA

SEQ ID NO: 376 - protein, 9 aa, Homo sapiens
TSRAVTPTC

SEQ ID NO: 377 - protein, 9 aa, Homo sapiens
PQEAFPAHP

SEQ ID NO: 378 - protein, 9 aa, Homo sapiens
AGPMPCSRL

SEQ ID NO: 379 - protein, 9 aa, Homo sapiens
CFHGPAFST

SEQ ID NO: 380 - protein, 9 aa, Homo sapiens
HGPAFSTLN

SEQ ID NO: 381 - protein, 9 aa, Homo sapiens
AHPNASLTM

SEQ ID NO: 382 - protein, 9 aa, Homo sapiens
RLLPSLRCS

SEQ ID NO: 383 - protein, 9 aa, Homo sapiens
GPMPCSRLL

SEQ ID NO: 384 - protein, 9 aa, Homo sapiens
CSRLLPSLR

SEQ ID NO: 385 - protein, 9 aa, Homo sapiens
MPCSRLLPS

SEQ ID NO: 386 - protein, 9 aa, Homo sapiens
LLPSLRCSL

SEQ ID NO: 387 - protein, 9 aa, Homo sapiens
SRLLPSLRC

SEQ ID NO: 388 - protein, 9 aa, Homo sapiens
LPSLRCSLH

SEQ ID NO: 389 - protein, 9 aa, Homo sapiens
PMPCSRLLP

SEQ ID NO: 390 - protein, 9 aa, Homo sapiens
PCSRLLPSL

SEQ ID NO: 391 - protein, 9 aa, Homo sapiens
SGDPASSRL

SEQ ID NO: 392 - protein, 9 aa, Homo sapiens
CSGDPASSR

SEQ ID NO: 393 - protein, 9 aa, Homo sapiens
CCSGDPASS

SEQ ID NO: 394 - protein, 9 aa, Homo sapiens
DPASSRLWG

SEQ ID NO: 395 - protein, 9 aa, Homo sapiens
SSRLWGAPL

SEQ ID NO: 396 - protein, 9 aa, Homo sapiens
PASSRLWGA

SEQ ID NO: 397 - protein, 9 aa, Homo sapiens
SRLWGAPLQ

SEQ ID NO: 398 - protein, 9 aa, Homo sapiens
GDPASSRLW

SEQ ID NO: 399 - protein, 9 aa, Homo sapiens
ASSRLWGAP

SEQ ID NO: 400 - protein, 9 aa, Homo sapiens
LTDPAQWEP

SEQ ID NO: 401 - protein, 9 aa, Homo sapiens
ASVPLLTDP

SEQ ID NO: 402 - protein, 9 aa, Homo sapiens
SVPLLTDPA

SEQ ID NO: 403 - protein, 9 aa, Homo sapiens
DPAQWEPVL

SEQ ID NO: 404 - protein, 9 aa, Homo sapiens
QASVPLLTD

SEQ ID NO: 405 - protein, 9 aa, Homo sapiens
VPLLTDPAQ

SEQ ID NO: 406 - protein, 9 aa, Homo sapiens
PLLTDPAQW

SEQ ID NO: 407 - protein, 9 aa, Homo sapiens
LLTDPAQWE

SEQ ID NO: 408 - protein, 9 aa, Homo sapiens
TDPAQWEPV

SEQ ID NO: 409 - protein, 9 aa, Homo sapiens
ASVPLLTDL

SEQ ID NO: 410 - protein, 9 aa, Homo sapiens
LTDLAQWEP

SEQ ID NO: 411 - protein, 9 aa, Homo sapiens
DLAQWEPVL

SEQ ID NO: 412 - protein, 9 aa, Homo sapiens
VPLLTDLAQ

SEQ ID NO: 413 - protein, 9 aa, Homo sapiens
SVPLLTDLA

SEQ ID NO: 414 - protein, 9 aa, Homo sapiens
PLLTDLAQW

SEQ ID NO: 415 - protein, 9 aa, Homo sapiens
LLTDLAQWE

SEQ ID NO: 416 - protein, 9 aa, Homo sapiens
TDLAQWEPV

SEQ ID NO: 417 - protein, 9 aa, Homo sapiens
ASVPLLTHL

SEQ ID NO: 418 - protein, 9 aa, Homo sapiens
HLAQWEPVL

SEQ ID NO: 419 - protein, 9 aa, Homo sapiens
LAQWEPVLV

SEQ ID NO: 420 - protein, 9 aa, Homo sapiens
VPLLTHLAQ

SEQ ID NO: 421 - protein, 9 aa, Homo sapiens
SVPLLTHLA

SEQ ID NO: 422 - protein, 9 aa, Homo sapiens
LTHLAQWEP

SEQ ID NO: 423 - protein, 9 aa, Homo sapiens
PLLTHLAQW

SEQ ID NO: 424 - protein, 9 aa, Homo sapiens
LLTHLAQWE

SEQ ID NO: 425 - protein, 9 aa, Homo sapiens
THLAQWEPV

SEQ ID NO: 426 - protein, 9 aa, Homo sapiens
ASLTMYVCT

SEQ ID NO: 427 - protein, 9 aa, Homo sapiens
LTMYVCTPV

SEQ ID NO: 428 - protein, 9 aa, Homo sapiens
VCTPVPHPD

SEQ ID NO: 429 - protein, 9 aa, Homo sapiens
CTPVPHPDP

SEQ ID NO: 430 - protein, 9 aa, Homo sapiens
YVCTPVPHP

SEQ ID NO: 431 - protein, 9 aa, Homo sapiens
TMYVCTPVP

SEQ ID NO: 432 - protein, 9 aa, Homo sapiens
SLTMYVCTP

SEQ ID NO: 433 - protein, 9 aa, Homo sapiens
MYVCTPVPH

SEQ ID NO: 434 - protein, 9 aa, Homo sapiens
RTPTRQISS

SEQ ID NO: 435 - protein, 9 aa, Homo sapiens
SSIDTDPPA

SEQ ID NO: 436 - protein, 9 aa, Homo sapiens
SRTPTRQIS

SEQ ID NO: 437 - protein, 9 aa, Homo sapiens
TRQISSIDT

SEQ ID NO: 438 - protein, 9 aa, Homo sapiens
ISSIDTDPP

SEQ ID NO: 439 - protein, 9 aa, Homo sapiens
QISSIDTDP

SEQ ID NO: 440 - protein, 9 aa, Homo sapiens
TPTRQISSI

SEQ ID NO: 441 - protein, 9 aa, Homo sapiens
RQISSIDTD

SEQ ID NO: 442 - protein, 9 aa, Homo sapiens
PTRQISSID

SEQ ID NO: 443 - protein, 9 aa, Homo sapiens
SSSDTDPPA

SEQ ID NO: 444 - protein, 9 aa, Homo sapiens
ISSSDTDPP

SEQ ID NO: 445 - protein, 9 aa, Homo sapiens
QISSSDTDP

SEQ ID NO: 446 - protein, 9 aa, Homo sapiens
TRQISSSDT

SEQ ID NO: 447 - protein, 9 aa, Homo sapiens
TPTRQISSS

SEQ ID NO: 448 - protein, 9 aa, Homo sapiens
RQISSSDTD

SEQ ID NO: 449 - protein, 9 aa, Homo sapiens
PTRQISSSD

SEQ ID NO: 450 - protein, 9 aa, Homo sapiens
SSDTDPPAD

SEQ ID NO: 451 - protein, 9 aa, Homo sapiens
GSSDTDPPA

SEQ ID NO: 452 - protein, 9 aa, Homo sapiens
SDTDPPADG

SEQ ID NO: 453 - protein, 9 aa, Homo sapiens
QIGSSDTDP

SEQ ID NO: 454 - protein, 9 aa, Homo sapiens
TRQIGSSDT

SEQ ID NO: 455 - protein, 9 aa, Homo sapiens
IGSSDTDPP

SEQ ID NO: 456 - protein, 9 aa, Homo sapiens
TPTRQIGSS

SEQ ID NO: 457 - protein, 9 aa, Homo sapiens
RQIGSSDTD

SEQ ID NO: 458 - protein, 9 aa, Homo sapiens
PTRQIGSSD

SEQ ID NO: 459 - protein, 9 aa, Homo sapiens
RGQALRRAQ

SEQ ID NO: 460 - protein, 9 aa, Homo sapiens
SRGQALRRA

SEQ ID NO: 461 - protein, 10 aa, Homo sapiens
DTDLCNASGA

SEQ ID NO: 462 - protein, 10 aa, Homo sapiens
CVDDSQDYYV

SEQ ID NO: 463 - protein, 10 aa, Homo sapiens
AVGLLTVISK

SEQ ID NO: 464 - protein, 10 aa, Homo sapiens
ALLPALGLLL

SEQ ID NO: 465 - protein, 10 aa, Homo sapiens
ALQPAAAILA

SEQ ID NO: 466 - protein, 10 aa, Homo sapiens
ALQPGTALLC

SEQ ID NO: 467 - protein, 10 aa, Homo sapiens
CCDTDLCNAS

SEQ ID NO: 468 - protein, 10 aa, Homo sapiens
GTALLCYSCK

SEQ ID NO: 469 - protein, 10 aa, Homo sapiens
NCVDDSQDYY

SEQ ID NO: 470 - protein, 10 aa, Homo sapiens
SNEDCLQVEN

SEQ ID NO: 471 - protein, 10 aa, Homo sapiens
LGEQCWTARI

SEQ ID NO: 472 - protein, 10 aa, Homo sapiens
QVENCTQLGE

SEQ ID NO: 473 - protein, 10 aa, Homo sapiens
LQPGTALLCY

SEQ ID NO: 474 - protein, 10 aa, Homo sapiens
DSQDYYVGKK

SEQ ID NO: 475 - protein, 10 aa, Homo sapiens
ITCCDTDLCN

SEQ ID NO: 476 - protein, 10 aa, Homo sapiens
LNCVDDSQDY

SEQ ID NO: 477 - protein, 10 aa, Homo sapiens
QLGEQCWTAR

SEQ ID NO: 478 - protein, 10 aa, Homo sapiens
SQDYYVGKKN

SEQ ID NO: 479 - protein, 10 aa, Homo sapiens
QVSNEDCLQV

SEQ ID NO: 480 - protein, 10 aa, Homo sapiens
AVLLALLMAG

SEQ ID NO: 481 - protein, 10 aa, Homo sapiens
AAAILALLPA

SEQ ID NO: 482 - protein, 10 aa, Homo sapiens
LLPALGLLLW

SEQ ID NO: 483 - protein, 10 aa, Homo sapiens
LALLMAGLAL

SEQ ID NO: 484 - protein, 10 aa, Homo sapiens
KAVLLALLMA

SEQ ID NO: 485 - protein, 10 aa, Homo sapiens
ILALLPALGL

SEQ ID NO: 486 - protein, 10 aa, Homo sapiens
VDDSQDYYVG

SEQ ID NO: 487 - protein, 10 aa, Homo sapiens
CTQLGEQCWT

SEQ ID NO: 488 - protein, 10 aa, Homo sapiens
NEDCLQVENC

SEQ ID NO: 489 - protein, 10 aa, Homo sapiens
LTVISKGCSL

SEQ ID NO: 490 - protein, 10 aa, Homo sapiens
VLLALLMAGL

SEQ ID NO: 491 - protein, 10 aa, Homo sapiens
DDSQDYYVGK

SEQ ID NO: 492 - protein, 10 aa, Homo sapiens
MAGLALQPGT

SEQ ID NO: 493 - protein, 10 aa, Homo sapiens
AAILALLPAL

SEQ ID NO: 494 - protein, 10 aa, Homo sapiens
LLCYSCKAQV

SEQ ID NO: 495 - protein, 10 aa, Homo sapiens
GAHALQPAAA

SEQ ID NO: 496 - protein, 10 aa, Homo sapiens
AILALLPALG

SEQ ID NO: 497 - protein, 10 aa, Homo sapiens
DLCNASGAHA

SEQ ID NO: 498 - protein, 10 aa, Homo sapiens
LALQPGTALL

SEQ ID NO: 499 - protein, 10 aa, Homo sapiens
HALQPAAAIL

SEQ ID NO: 500 - protein, 10 aa, Homo sapiens
ALLMAGLALQ

SEQ ID NO: 501 - protein, 10 aa, Homo sapiens
RAVGLLTVIS

SEQ ID NO: 502 - protein, 10 aa, Homo sapiens
ASGAHALQPA

SEQ ID NO: 503 - protein, 10 aa, Homo sapiens
CSLNCVDDSQ

SEQ ID NO: 504 - protein, 10 aa, Homo sapiens
LPALGLLLWG

SEQ ID NO: 505 - protein, 10 aa, Homo sapiens
GLALQPGTAL

SEQ ID NO: 506 - protein, 10 aa, Homo sapiens
TCCDTDLCNA

SEQ ID NO: 507 - protein, 10 aa, Homo sapiens
ALLCYSCKAQ

SEQ ID NO: 508 - protein, 10 aa, Homo sapiens
LCYSCKAQVS

SEQ ID NO: 509 - protein, 10 aa, Homo sapiens
LLALLMAGLA

SEQ ID NO: 510 - protein, 10 aa, Homo sapiens
CLQVENCTQL

SEQ ID NO: 511 - protein, 10 aa, Homo sapiens
LLTVISKGCS

SEQ ID NO: 512 - protein, 10 aa, Homo sapiens
TALLCYSCKA

SEQ ID NO: 513 - protein, 10 aa, Homo sapiens
TVISKGCSLN

SEQ ID NO: 514 - protein, 10 aa, Homo sapiens
DCLQVENCTQ

SEQ ID NO: 515 - protein, 10 aa, Homo sapiens
GLLLWGPGQL

SEQ ID NO: 516 - protein, 10 aa, Homo sapiens
KAQVSNEDCL

SEQ ID NO: 517 - protein, 10 aa, Homo sapiens
ALGLLLWGPG

SEQ ID NO: 518 - protein, 10 aa, Homo sapiens
LALLPALGLL

SEQ ID NO: 519 - protein, 10 aa, Homo sapiens
GCSLNCVDDS

SEQ ID NO: 520 - protein, 10 aa, Homo sapiens
LCNASGAHAL

SEQ ID NO: 521 - protein, 10 aa, Homo sapiens
NCTQLGEQCW

SEQ ID NO: 522 - protein, 10 aa, Homo sapiens
GLLTVISKGC

SEQ ID NO: 523 - protein, 10 aa, Homo sapiens
NITCCDTDLC

SEQ ID NO: 524 - protein, 10 aa, Homo sapiens
EQCWTARIRA

SEQ ID NO: 525 - protein, 10 aa, Homo sapiens
LQPAAAILAL

SEQ ID NO: 526 - protein, 10 aa, Homo sapiens
VISKGCSLNC

SEQ ID NO: 527 - protein, 10 aa, Homo sapiens
CNASGAHALQ

SEQ ID NO: 528 - protein, 10 aa, Homo sapiens
SGAHALQPAA

SEQ ID NO: 529 - protein, 10 aa, Homo sapiens
GEQCWTARIR

SEQ ID NO: 530 - protein, 10 aa, Homo sapiens
RIRAVGLLTV

SEQ ID NO: 531 - protein, 10 aa, Homo sapiens
LGLLLWGPGQ

SEQ ID NO: 532 - protein, 10 aa, Homo sapiens
NASGAHALQP

SEQ ID NO: 533 - protein, 10 aa, Homo sapiens
WTARIRAVGL

SEQ ID NO: 534 - protein, 10 aa, Homo sapiens
LLMAGLALQP

SEQ ID NO: 535 - protein, 10 aa, Homo sapiens
LMAGLALQPG

SEQ ID NO: 536 - protein, 10 aa, Homo sapiens
QPAAAILALL

SEQ ID NO: 537 - protein, 10 aa, Homo sapiens
YYVGKKNITC

SEQ ID NO: 538 - protein, 10 aa, Homo sapiens
KNITCCDTDL

SEQ ID NO: 539 - protein, 10 aa, Homo sapiens
AGLALQPGTA

SEQ ID NO: 540 - protein, 10 aa, Homo sapiens
QPGTALLCYS

SEQ ID NO: 541 - protein, 10 aa, Homo sapiens
MKAVLLALLM

SEQ ID NO: 542 - protein, 10 aa, Homo sapiens
VGLLTVISKG

SEQ ID NO: 543 - protein, 10 aa, Homo sapiens
ENCTQLGEQC

SEQ ID NO: 544 - protein, 10 aa, Homo sapiens
ISKGCSLNCV

SEQ ID NO: 545 - protein, 10 aa, Homo sapiens
VSNEDCLQVE

SEQ ID NO: 546 - protein, 10 aa, Homo sapiens
AQVSNEDCLQ

SEQ ID NO: 547 - protein, 10 aa, Homo sapiens
LQVENCTQLG

SEQ ID NO: 548 - protein, 10 aa, Homo sapiens
TQLGEQCWTA

SEQ ID NO: 549 - protein, 10 aa, Homo sapiens
CWTARIRAVG

SEQ ID NO: 550 - protein, 10 aa, Homo sapiens
SLNCVDDSQD

SEQ ID NO: 551 - protein, 10 aa, Homo sapiens
YVGKKNITCC

SEQ ID NO: 552 - protein, 10 aa, Homo sapiens
CDTDLCNASG

SEQ ID NO: 553 - protein, 10 aa, Homo sapiens
AHALQPAAAI

SEQ ID NO: 554 - protein, 10 aa, Homo sapiens
QCWTARIRAV

SEQ ID NO: 555 - protein, 10 aa, Homo sapiens
CYSCKAQVSN

SEQ ID NO: 556 - protein, 10 aa, Homo sapiens
TARIRAVGLL

SEQ ID NO: 557 - protein, 10 aa, Homo sapiens
PAAAILALLP

SEQ ID NO: 558 - protein, 10 aa, Homo sapiens
CKAQVSNEDC

SEQ ID NO: 559 - protein, 10 aa, Homo sapiens
TDLCNASGAH

SEQ ID NO: 560 - protein, 10 aa, Homo sapiens
VENCTQLGEQ

SEQ ID NO: 561 - protein, 10 aa, Homo sapiens
HPDPPMALSR

SEQ ID NO: 562 - protein, 10 aa, Homo sapiens
DTDPPADGPS

SEQ ID NO: 563 - protein, 10 aa, Homo sapiens
SGDPASYRLW

SEQ ID NO: 564 - protein, 10 aa, Homo sapiens
ACCSGDPASY

SEQ ID NO: 565 - protein, 10 aa, Homo sapiens
SIDTDPPADG

SEQ ID NO: 566 - protein, 10 aa, Homo sapiens
TLNPVLRHLF

SEQ ID NO: 567 - protein, 10 aa, Homo sapiens
QWEPVLVPEA

SEQ ID NO: 568 - protein, 10 aa, Homo sapiens
CATPAGPMPC

SEQ ID NO: 569 - protein, 10 aa, Homo sapiens
EAHPNASLTM

SEQ ID NO: 570 - protein, 10 aa, Homo sapiens
HLFPQEAFPA

SEQ ID NO: 571 - protein, 10 aa, Homo sapiens
VPEAHPNASL

SEQ ID NO: 572 - protein, 10 aa, Homo sapiens
WSVVSPAPSR

SEQ ID NO: 573 - protein, 10 aa, Homo sapiens
TTTWARRTSR

SEQ ID NO: 574 - protein, 10 aa, Homo sapiens
LTHPAQWEPV

SEQ ID NO: 575 - protein, 10 aa, Homo sapiens
LCCCFHGPAF

SEQ ID NO: 576 - protein, 10 aa, Homo sapiens
GVVPQASVPL

SEQ ID NO: 577 - protein, 10 aa, Homo sapiens
VLVPEAHPNA

SEQ ID NO: 578 - protein, 10 aa, Homo sapiens
ASVPLLTHPA

SEQ ID NO: 579 - protein, 10 aa, Homo sapiens
VPHPDPPMAL

SEQ ID NO: 580 - protein, 10 aa, Homo sapiens
RLPPSLRCSL

SEQ ID NO: 581 - protein, 10 aa, Homo sapiens
PADGPSNPLC

SEQ ID NO: 582 - protein, 10 aa, Homo sapiens
CCSGDPASYR

SEQ ID NO: 583 - protein, 10 aa, Homo sapiens
VVSPAPSRGQ

SEQ ID NO: 584 - protein, 10 aa, Homo sapiens
AVTPTCATPA

SEQ ID NO: 585 - protein, 10 aa, Homo sapiens
FSTLNPVLRH

SEQ ID NO: 586 - protein, 10 aa, Homo sapiens
QEAFPAHPIY

SEQ ID NO: 587 - protein, 10 aa, Homo sapiens
ATPAGPMPCS

SEQ ID NO: 588 - protein, 10 aa, Homo sapiens
EAFPAHPIYD

SEQ ID NO: 589 - protein, 10 aa, Homo sapiens
VTPTCATPAG

SEQ ID NO: 590 - protein, 10 aa, Homo sapiens
APVPHPDPPM

SEQ ID NO: 591 - protein, 10 aa, Homo sapiens
CCFHGPAFST

SEQ ID NO: 592 - protein, 10 aa, Homo sapiens
GAPLQPTLGV

SEQ ID NO: 593 - protein, 10 aa, Homo sapiens
PAHPIYDLSQ

SEQ ID NO: 594 - protein, 10 aa, Homo sapiens
CSGDPASYRL

SEQ ID NO: 595 - protein, 10 aa, Homo sapiens
AHPNASLTMY

SEQ ID NO: 596 - protein, 10 aa, Homo sapiens
STLNPVLRHL

SEQ ID NO: 597 - protein, 10 aa, Homo sapiens
RTTTWARRTS

SEQ ID NO: 598 - protein, 10 aa, Homo sapiens
GPSNPLCCCF

SEQ ID NO: 599 - protein, 10 aa, Homo sapiens
IYDLSQVWSV

SEQ ID NO: 600 - protein, 10 aa, Homo sapiens
MTHRTTTWAR

SEQ ID NO: 601 - protein, 10 aa, Homo sapiens
TPAGPMPCSR

SEQ ID NO: 602 - protein, 10 aa, Homo sapiens
RTPTRQIGSI

SEQ ID NO: 603 - protein, 10 aa, Homo sapiens
ADGPSNPLCC

SEQ ID NO: 604 - protein, 10 aa, Homo sapiens
SPAPSRGQAL

SEQ ID NO: 605 - protein, 10 aa, Homo sapiens
SRTPTRQIGS

SEQ ID NO: 606 - protein, 10 aa, Homo sapiens
WGAPLQPTLG

SEQ ID NO: 607 - protein, 10 aa, Homo sapiens
SACCSGDPAS

SEQ ID NO: 608 - protein, 10 aa, Homo sapiens
DLSQVWSVVS

SEQ ID NO: 609 - protein, 10 aa, Homo sapiens
NASLTMYVCA

SEQ ID NO: 610 - protein, 10 aa, Homo sapiens
VCAPVPHPDP

SEQ ID NO: 611 - protein, 10 aa, Homo sapiens
CCCFHGPAFS

SEQ ID NO: 612 - protein, 10 aa, Homo sapiens
VVPQASVPLL

SEQ ID NO: 613 - protein, 10 aa, Homo sapiens
TLGVVPQASV

SEQ ID NO: 614 - protein, 10 aa, Homo sapiens
SLTMYVCAPV

SEQ ID NO: 615 - protein, 10 aa, Homo sapiens
PAPSRGQALR

SEQ ID NO: 616 - protein, 10 aa, Homo sapiens
SVPLLTHPAQ

SEQ ID NO: 617 - protein, 10 aa, Homo sapiens
PSNPLCCCFH

SEQ ID NO: 618 - protein, 10 aa, Homo sapiens
VSPAPSRGQA

SEQ ID NO: 619 - protein, 10 aa, Homo sapiens
CSLHSACCSG

SEQ ID NO: 620 - protein, 10 aa, Homo sapiens
HSACCSGDPA

SEQ ID NO: 621 - protein, 10 aa, Homo sapiens
PQEAFPAHPI

SEQ ID NO: 622 - protein, 10 aa, Homo sapiens
VPQASVPLLT

SEQ ID NO: 623 - protein, 10 aa, Homo sapiens
HPNASLTMYV

SEQ ID NO: 624 - protein, 10 aa, Homo sapiens
GPMPCSRLPP

SEQ ID NO: 625 - protein, 10 aa, Homo sapiens
SNPLCCCFHG

SEQ ID NO: 626 - protein, 10 aa, Homo sapiens
NPVLRHLFPQ

SEQ ID NO: 627 - protein, 10 aa, Homo sapiens
APSRGQALRR

SEQ ID NO: 628 - protein, 10 aa, Homo sapiens
RCSLHSACCS

SEQ ID NO: 629 - protein, 10 aa, Homo sapiens
TMYVCAPVPH

SEQ ID NO: 630 - protein, 10 aa, Homo sapiens
PAGPMPCSRL

SEQ ID NO: 631 - protein, 10 aa, Homo sapiens
LVPEAHPNAS

SEQ ID NO: 632 - protein, 10 aa, Homo sapiens
SVVSPAPSRG

SEQ ID NO: 633 - protein, 10 aa, Homo sapiens
AFSTLNPVLR

SEQ ID NO: 634 - protein, 10 aa, Homo sapiens
PMALSRTPTR

SEQ ID NO: 635 - protein, 10 aa, Homo sapiens
TDPPADGPSN

SEQ ID NO: 636 - protein, 10 aa, Homo sapiens
MALSRTPTRQ

SEQ ID NO: 637 - protein, 10 aa, Homo sapiens
CSRLPPSLRC

SEQ ID NO: 638 - protein, 10 aa, Homo sapiens
HPAQWEPVLV

SEQ ID NO: 639 - protein, 10 aa, Homo sapiens
LTMYVCAPVP

SEQ ID NO: 640 - protein, 10 aa, Homo sapiens
IGSIDTDPPA

SEQ ID NO: 641 - protein, 10 aa, Homo sapiens
SRGQALRRAR

SEQ ID NO: 642 - protein, 10 aa, Homo sapiens
FHGPAFSTLN

SEQ ID NO: 643 - protein, 10 aa, Homo sapiens
RTSRAVTPTC

SEQ ID NO: 644 - protein, 10 aa, Homo sapiens
QPTLGVVPQA

SEQ ID NO: 645 - protein, 10 aa, Homo sapiens
MPCSRLPPSL

SEQ ID NO: 646 - protein, 10 aa, Homo sapiens
VPLLTHPAQW

SEQ ID NO: 647 - protein, 10 aa, Homo sapiens
LRHLFPQEAF

SEQ ID NO: 648 - protein, 10 aa, Homo sapiens
SRLPPSLRCS

SEQ ID NO: 649 - protein, 10 aa, Homo sapiens
LSQVWSVVSP

SEQ ID NO: 650 - protein, 10 aa, Homo sapiens
GSIDTDPPAD

SEQ ID NO: 651 - protein, 10 aa, Homo sapiens
ASYRLWGAPL

SEQ ID NO: 652 - protein, 10 aa, Homo sapiens
LQPTLGVVPQ

SEQ ID NO: 653 - protein, 10 aa, Homo sapiens
DPASYRLWGA

SEQ ID NO: 654 - protein, 10 aa, Homo sapiens
DGPSNPLCCC

SEQ ID NO: 655 - protein, 10 aa, Homo sapiens
GPAFSTLNPV

SEQ ID NO: 656 - protein, 10 aa, Homo sapiens
FPAHPIYDLS

SEQ ID NO: 657 - protein, 10 aa, Homo sapiens
HPIYDLSQVW

SEQ ID NO: 658 - protein, 10 aa, Homo sapiens
APLQPTLGVV

SEQ ID NO: 659 - protein, 10 aa, Homo sapiens
PTCATPAGPM

SEQ ID NO: 660 - protein, 10 aa, Homo sapiens
GDPASYRLWG

SEQ ID NO: 661 - protein, 10 aa, Homo sapiens
RLLPSLRCSL

SEQ ID NO: 662 - protein, 10 aa, Homo sapiens
LPSLRCSLHS

SEQ ID NO: 663 - protein, 10 aa, Homo sapiens
GPMPCSRLLP

SEQ ID NO: 664 - protein, 10 aa, Homo sapiens
LLPSLRCSLH

SEQ ID NO: 665 - protein, 10 aa, Homo sapiens
CSRLLPSLRC

SEQ ID NO: 666 - protein, 10 aa, Homo sapiens
MPCSRLLPSL

SEQ ID NO: 667 - protein, 10 aa, Homo sapiens
AGPMPCSRLL

SEQ ID NO: 668 - protein, 10 aa, Homo sapiens
PMPCSRLLPS

SEQ ID NO: 669 - protein, 10 aa, Homo sapiens
PCSRLLPSLR

SEQ ID NO: 670 - protein, 10 aa, Homo sapiens
SRLLPSLRCS

SEQ ID NO: 671 - protein, 10 aa, Homo sapiens
SGDPASSRLW

SEQ ID NO: 672 - protein, 10 aa, Homo sapiens
CCSGDPASSR

SEQ ID NO: 673 - protein, 10 aa, Homo sapiens
ACCSGDPASS

SEQ ID NO: 674 - protein, 10 aa, Homo sapiens
CSGDPASSRL

SEQ ID NO: 675 - protein, 10 aa, Homo sapiens
ASSRLWGAPL

SEQ ID NO: 676 - protein, 10 aa, Homo sapiens
SSRLWGAPLQ

SEQ ID NO: 677 - protein, 10 aa, Homo sapiens
DPASSRLWGA

SEQ ID NO: 678 - protein, 10 aa, Homo sapiens
GDPASSRLWG

SEQ ID NO: 679 - protein, 10 aa, Homo sapiens
SRLWGAPLQP

SEQ ID NO: 680 - protein, 10 aa, Homo sapiens
PASSRLWGAP

SEQ ID NO: 681 - protein, 10 aa, Homo sapiens
LTDPAQWEPV

SEQ ID NO: 682 - protein, 10 aa, Homo sapiens
ASVPLLTDPA

SEQ ID NO: 683 - protein, 10 aa, Homo sapiens
SVPLLTDPAQ

SEQ ID NO: 684 - protein, 10 aa, Homo sapiens
VPLLTDPAQW

SEQ ID NO: 685 - protein, 10 aa, Homo sapiens
DPAQWEPVLV

SEQ ID NO: 686 - protein, 10 aa, Homo sapiens
LLTDPAQWEP

SEQ ID NO: 687 - protein, 10 aa, Homo sapiens
TDPAQWEPVL

SEQ ID NO: 688 - protein, 10 aa, Homo sapiens
QASVPLLTDP

SEQ ID NO: 689 - protein, 10 aa, Homo sapiens
PLLTDPAQWE

SEQ ID NO: 690 - protein, 10 aa, Homo sapiens
PQASVPLLTD

SEQ ID NO: 691 - protein, 10 aa, Homo sapiens
LTDLAQWEPV

SEQ ID NO: 692 - protein, 10 aa, Homo sapiens
ASVPLLTDLA

SEQ ID NO: 693 - protein, 10 aa, Homo sapiens
SVPLLTDLAQ

SEQ ID NO: 694 - protein, 10 aa, Homo sapiens
DLAQWEPVLV

SEQ ID NO: 695 - protein, 10 aa, Homo sapiens
QASVPLLTDL

SEQ ID NO: 696 - protein, 10 aa, Homo sapiens
VPLLTDLAQW

SEQ ID NO: 697 - protein, 10 aa, Homo sapiens
LLTDLAQWEP

SEQ ID NO: 698 - protein, 10 aa, Homo sapiens
TDLAQWEPVL

SEQ ID NO: 699 - protein, 10 aa, Homo sapiens
PLLTDLAQWE

SEQ ID NO: 700 - protein, 10 aa, Homo sapiens
ASVPLLTHLA

SEQ ID NO: 701 - protein, 10 aa, Homo sapiens
SVPLLTHLAQ

SEQ ID NO: 702 - protein, 10 aa, Homo sapiens
LTHLAQWEPV

SEQ ID NO: 703 - protein, 10 aa, Homo sapiens
HLAQWEPVLV

SEQ ID NO: 704 - protein, 10 aa, Homo sapiens
QASVPLLTHL

SEQ ID NO: 705 - protein, 10 aa, Homo sapiens
LAQWEPVLVP

SEQ ID NO: 706 - protein, 10 aa, Homo sapiens
VPLLTHLAQW

SEQ ID NO: 707 - protein, 10 aa, Homo sapiens
LLTHLAQWEP

SEQ ID NO: 708 - protein, 10 aa, Homo sapiens
THLAQWEPVL

SEQ ID NO: 709 - protein, 10 aa, Homo sapiens
PLLTHLAQWE

SEQ ID NO: 710 - protein, 10 aa, Homo sapiens
TPVPHPDPPM

SEQ ID NO: 711 - protein, 10 aa, Homo sapiens
NASLTMYVCT

SEQ ID NO: 712 - protein, 10 aa, Homo sapiens
VCTPVPHPDP

SEQ ID NO: 713 - protein, 10 aa, Homo sapiens
TMYVCTPVPH

SEQ ID NO: 714 - protein, 10 aa, Homo sapiens
SLTMYVCTPV

SEQ ID NO: 715 - protein, 10 aa, Homo sapiens
LTMYVCTPVP

SEQ ID NO: 716 - protein, 10 aa, Homo sapiens
CTPVPHPDPP

SEQ ID NO: 717 - protein, 10 aa, Homo sapiens
ASLTMYVCTP

SEQ ID NO: 718 - protein, 10 aa, Homo sapiens
YVCTPVPHPD

SEQ ID NO: 719 - protein, 10 aa, Homo sapiens
MYVCTPVPHP

SEQ ID NO: 720 - protein, 10 aa, Homo sapiens
ISSIDTDPPA

SEQ ID NO: 721 - protein, 10 aa, Homo sapiens
SRTPTRQISS

SEQ ID NO: 722 - protein, 10 aa, Homo sapiens
RTPTRQISSI

SEQ ID NO: 723 - protein, 10 aa, Homo sapiens
SSIDTDPPAD

SEQ ID NO: 724 - protein, 10 aa, Homo sapiens
LSRTPTRQIS

SEQ ID NO: 725 - protein, 10 aa, Homo sapiens
PTRQISSIDT

SEQ ID NO: 726 - protein, 10 aa, Homo sapiens
QISSIDTDPP

SEQ ID NO: 727 - protein, 10 aa, Homo sapiens
RQISSIDTDP

SEQ ID NO: 728 - protein, 10 aa, Homo sapiens
TRQISSIDTD

SEQ ID NO: 729 - protein, 10 aa, Homo sapiens
TPTRQISSID

SEQ ID NO: 730 - protein, 10 aa, Homo sapiens
ISSIDTDPPA

SEQ ID NO: 731 - protein, 10 aa, Homo sapiens
SRTPTRQISS

SEQ ID NO: 732 - protein, 10 aa, Homo sapiens
RTPTRQISSI

SEQ ID NO: 733 - protein, 10 aa, Homo sapiens
SSIDTDPPAD

SEQ ID NO: 734 - protein, 10 aa, Homo sapiens
LSRTPTRQIS

SEQ ID NO: 735 - protein, 10 aa, Homo sapiens
PTRQISSIDT

SEQ ID NO: 736 - protein, 10 aa, Homo sapiens
QISSIDTDPP

SEQ ID NO: 737 - protein, 10 aa, Homo sapiens
RQISSIDTDP

SEQ ID NO: 738 - protein, 10 aa, Homo sapiens
TRQISSIDTD

SEQ ID NO: 739 - protein, 10 aa, Homo sapiens
TPTRQISSID

SEQ ID NO: 740 - protein, 10 aa, Homo sapiens
SSDTDPPADG

SEQ ID NO: 741 - protein, 10 aa, Homo sapiens
RTPTRQIGSS

SEQ ID NO: 742 - protein, 10 aa, Homo sapiens
IGSSDTDPPA

SEQ ID NO: 743 - protein, 10 aa, Homo sapiens
GSSDTDPPAD

SEQ ID NO: 744 - protein, 10 aa, Homo sapiens
QIGSSDTDPP

SEQ ID NO: 745 - protein, 10 aa, Homo sapiens
PTRQIGSSDT

SEQ ID NO: 746 - protein, 10 aa, Homo sapiens
RQIGSSDTDP

SEQ ID NO: 747 - protein, 10 aa, Homo sapiens
TRQIGSSDTD

SEQ ID NO: 748 - protein, 10 aa, Homo sapiens
SDTDPPADGP

SEQ ID NO: 749 - protein, 10 aa, Homo sapiens
TPTRQIGSSD

SEQ ID NO: 750 - protein, 10 aa, Homo sapiens
SRGQALRRAQ

SEQ ID NO: 751 - protein, 10 aa, Homo sapiens
PSRGQALRRA

SEQ ID NO: 752 - protein, 9 aa, Homo sapiens
QLGEQCWTA

SEQ ID NO: 753 - protein, 9 aa, Homo sapiens
LLALLMAGL

SEQ ID NO: 754 - protein, 9 aa, Homo sapiens
ALLMAGLAL

SEQ ID NO: 755 - protein, 9 aa, Homo sapiens
LLPALGLLL

SEQ ID NO: 756 - protein, 9 aa, Homo sapiens
AILALLPAL

SEQ ID NO: 757 - protein, 9 aa, Homo sapiens
ALLPALGLL

SEQ ID NO: 758 - protein, 9 aa, Homo sapiens
ALQPGTALL

SEQ ID NO: 759 - protein, 9 aa, Homo sapiens
ALLCYSCKA

SEQ ID NO: 760 - protein, 9 aa, Homo sapiens
LLLWGPGQL

SEQ ID NO: 761 - protein, 9 aa, Homo sapiens
TQLGEQCWT

SEQ ID NO: 762 - protein, 9 aa, Homo sapiens
LQVENCTQL

SEQ ID NO: 763 - protein, 9 aa, Homo sapiens
ALQPAAAIL

SEQ ID NO: 764 - protein, 9 aa, Homo sapiens
LLTVISKGC

SEQ ID NO: 765 - protein, 9 aa, Homo sapiens
AVLLALLMA

SEQ ID NO: 766 - protein, 9 aa, Homo sapiens
VSNEDCLQV

SEQ ID NO: 767 - protein, 9 aa, Homo sapiens
NITCCDTDL

SEQ ID NO: 768 - protein, 9 aa, Homo sapiens
LCYSCKAQV

SEQ ID NO: 769 - protein, 9 aa, Homo sapiens
YVGKKNITC

SEQ ID NO: 770 - protein, 9 aa, Homo sapiens
TVISKGCSL

SEQ ID NO: 771 - protein, 9 aa, Homo sapiens
LALLPALGL

SEQ ID NO: 772 - protein, 9 aa, Homo sapiens
LALQPGTAL

SEQ ID NO: 773 - protein, 9 aa, Homo sapiens
VLLALLMAG

SEQ ID NO: 774 - protein, 9 aa, Homo sapiens
AQVSNEDCL

SEQ ID NO: 775 - protein, 9 aa, Homo sapiens
LQPGTALLC

SEQ ID NO: 776 - protein, 9 aa, Homo sapiens
LQPAAAILA

SEQ ID NO: 777 - protein, 9 aa, Homo sapiens
GLALQPGTA

SEQ ID NO: 778 - protein, 9 aa, Homo sapiens
GLLTVISKG

SEQ ID NO: 779 - protein, 9 aa, Homo sapiens
VDDSQDYYV

SEQ ID NO: 780 - protein, 9 aa, Homo sapiens
QPAAAILAL

SEQ ID NO: 781 - protein, 9 aa, Homo sapiens
QCWTARIRA

SEQ ID NO: 782 - protein, 9 aa, Homo sapiens
ALGLLLWGP

SEQ ID NO: 783 - protein, 9 aa, Homo sapiens
KAVLLALLM

SEQ ID NO: 784 - protein, 9 aa, Homo sapiens
SKGCSLNCV

SEQ ID NO: 785 - protein, 9 aa, Homo sapiens
LLMAGLALQ

SEQ ID NO: 786 - protein, 9 aa, Homo sapiens
GEQCWTARI

SEQ ID NO: 787 - protein, 9 aa, Homo sapiens
AGLALQPGT

SEQ ID NO: 788 - protein, 9 aa, Homo sapiens
AAILALLPA

SEQ ID NO: 789 - protein, 9 aa, Homo sapiens
CNASGAHAL

SEQ ID NO: 790 - protein, 9 aa, Homo sapiens
RAVGLLTVI

SEQ ID NO: 791 - protein, 9 aa, Homo sapiens
ILALLPALG

SEQ ID NO: 792 - protein, 9 aa, Homo sapiens
KAQVSNEDC

SEQ ID NO: 793 - protein, 9 aa, Homo sapiens
MKAVLLALL

SEQ ID NO: 794 - protein, 9 aa, Homo sapiens
RIRAVGLLT

SEQ ID NO: 795 - protein, 9 aa, Homo sapiens
SGAHALQPA

SEQ ID NO: 796 - protein, 9 aa, Homo sapiens
GTALLCYSC

SEQ ID NO: 797 - protein, 9 aa, Homo sapiens
GAHALQPAA

SEQ ID NO: 798 - protein, 9 aa, Homo sapiens
ITCCDTDLC

SEQ ID NO: 799 - protein, 9 aa, Homo sapiens
LALLMAGLA

SEQ ID NO: 800 - protein, 9 aa, Homo sapiens
GLLLWGPGQ

SEQ ID NO: 801 - protein, 9 aa, Homo sapiens
LCNASGAHA

SEQ ID NO: 802 - protein, 9 aa, Homo sapiens
IRAVGLLTV

SEQ ID NO: 803 - protein, 9 aa, Homo sapiens
KKNITCCDT

SEQ ID NO: 804 - protein, 9 aa, Homo sapiens
CCDTDLCNA

SEQ ID NO: 805 - protein, 9 aa, Homo sapiens
CVDDSQDYY

SEQ ID NO: 806 - protein, 9 aa, Homo sapiens
TDLCNASGA

SEQ ID NO: 807 - protein, 9 aa, Homo sapiens
LLCYSCKAQ

SEQ ID NO: 808 - protein, 9 aa, Homo sapiens
TARIRAVGL

SEQ ID NO: 809 - protein, 9 aa, Homo sapiens
LMAGLALQP

SEQ ID NO: 810 - protein, 9 aa, Homo sapiens
HALQPAAAI

SEQ ID NO: 811 - protein, 9 aa, Homo sapiens
VISKGCSLN

SEQ ID NO: 812 - protein, 9 aa, Homo sapiens
NCTQLGEQC

SEQ ID NO: 813 - protein, 9 aa, Homo sapiens
PAAAILALL

SEQ ID NO: 814 - protein, 9 aa, Homo sapiens
CLQVENCTQ

SEQ ID NO: 815 - protein, 9 aa, Homo sapiens
DCLQVENCT

SEQ ID NO: 816 - protein, 9 aa, Homo sapiens
SLNCVDDSQ

SEQ ID NO: 817 - protein, 9 aa, Homo sapiens
CWTARIRAV

SEQ ID NO: 818 - protein, 9 aa, Homo sapiens
VGKKNITCC

SEQ ID NO: 819 - protein, 9 aa, Homo sapiens
MAGLALQPG

SEQ ID NO: 820 - protein, 9 aa, Homo sapiens
AHALQPAAA

SEQ ID NO: 821 - protein, 9 aa, Homo sapiens
AVGLLTVIS

SEQ ID NO: 822 - protein, 9 aa, Homo sapiens
YSCKAQVSN

SEQ ID NO: 823 - protein, 9 aa, Homo sapiens
CSLNCVDDS

SEQ ID NO: 824 - protein, 9 aa, Homo sapiens
TCCDTDLCN

SEQ ID NO: 825 - protein, 9 aa, Homo sapiens
NCVDDSQDY

SEQ ID NO: 826 - protein, 9 aa, Homo sapiens
WTARIRAVG

SEQ ID NO: 827 - protein, 9 aa, Homo sapiens
YYVGKKNIT

SEQ ID NO: 828 - protein, 9 aa, Homo sapiens
ISKGCSLNC

SEQ ID NO: 829 - protein, 9 aa, Homo sapiens
LPALGLLLW

SEQ ID NO: 830 - protein, 9 aa, Homo sapiens
VGLLTVISK

SEQ ID NO: 831 - protein, 9 aa, Homo sapiens
QVSNEDCLQ

SEQ ID NO: 832 - protein, 9 aa, Homo sapiens
TALLCYSCK

SEQ ID NO: 833 - protein, 9 aa, Homo sapiens
QPGTALLCY

SEQ ID NO: 834 - protein, 9 aa, Homo sapiens
PALGLLLWG

SEQ ID NO: 835 - protein, 9 aa, Homo sapiens
CTQLGEQCW

SEQ ID NO: 836 - protein, 9 aa, Homo sapiens
ARIRAVGLL

SEQ ID NO: 837 - protein, 9 aa, Homo sapiens
DLCNASGAH

SEQ ID NO: 838 - protein, 9 aa, Homo sapiens
LGLLLWGPG

SEQ ID NO: 839 - protein, 9 aa, Homo sapiens
EDCLQVENC

SEQ ID NO: 840 - protein, 9 aa, Homo sapiens
NEDCLQVEN

SEQ ID NO: 841 - protein, 9 aa, Homo sapiens
VENCTQLGE

SEQ ID NO: 842 - protein, 9 aa, Homo sapiens
CDTDLCNAS

SEQ ID NO: 843 - protein, 9 aa, Homo sapiens
QVENCTQLG

SEQ ID NO: 844 - protein, 9 aa, Homo sapiens
DYYVGKKNI

SEQ ID NO: 845 - protein, 9 aa, Homo sapiens
QDYYVGKKN

SEQ ID NO: 846 - protein, 9 aa, Homo sapiens
LTVISKGCS

SEQ ID NO: 847 - protein, 9 aa, Homo sapiens
AAAILALLP

SEQ ID NO: 848 - protein, 9 aa, Homo sapiens
NASGAHALQ

SEQ ID NO: 849 - protein, 9 aa, Homo sapiens
SQDYYVGKK

SEQ ID NO: 850 - protein, 9 aa, Homo sapiens
KNITCCDTD

SEQ ID NO: 851 - protein, 9 aa, Homo sapiens
LNCVDDSQD

SEQ ID NO: 852 - protein, 9 aa, Homo sapiens
YDLSQVWSV

SEQ ID NO: 853 - protein, 9 aa, Homo sapiens
TLNPVLRHL

SEQ ID NO: 854 - protein, 9 aa, Homo sapiens
QVWSVVSPA

SEQ ID NO: 855 - protein, 9 aa, Homo sapiens
LTMYVCAPV

SEQ ID NO: 856 - protein, 9 aa, Homo sapiens
DLSQVWSVV

SEQ ID NO: 857 - protein, 9 aa, Homo sapiens
VVPQASVPL

SEQ ID NO: 858 - protein, 9 aa, Homo sapiens
LVPEAHPNA

SEQ ID NO: 859 - protein, 9 aa, Homo sapiens
APLQPTLGV

SEQ ID NO: 860 - protein, 9 aa, Homo sapiens
FPAHPIYDL

SEQ ID NO: 861 - protein, 9 aa, Homo sapiens
WEPVLVPEA

SEQ ID NO: 862 - protein, 9 aa, Homo sapiens
SLRCSLHSA

SEQ ID NO: 863 - protein, 9 aa, Homo sapiens
LGVVPQASV

SEQ ID NO: 864 - protein, 9 aa, Homo sapiens
MTHRTTTWA

SEQ ID NO: 865 - protein, 9 aa, Homo sapiens
WGAPLQPTL

SEQ ID NO: 866 - protein, 9 aa, Homo sapiens
VPQASVPLL

SEQ ID NO: 867 - protein, 9 aa, Homo sapiens
SVPLLTHPA

SEQ ID NO: 868 - protein, 9 aa, Homo sapiens
RTSRAVTPT

SEQ ID NO: 869 - protein, 9 aa, Homo sapiens
LPPSLRCSL

SEQ ID NO: 870 - protein, 9 aa, Homo sapiens
QEAFPAHPI

SEQ ID NO: 871 - protein, 9 aa, Homo sapiens
PLQPTLGVV

SEQ ID NO: 872 - protein, 9 aa, Homo sapiens
PAFSTLNPV

SEQ ID NO: 873 - protein, 9 aa, Homo sapiens
ASLTMYVCA

SEQ ID NO: 874 - protein, 9 aa, Homo sapiens
AGPMPCSRL

SEQ ID NO: 875 - protein, 9 aa, Homo sapiens
LLTHPAQWE

SEQ ID NO: 876 - protein, 9 aa, Homo sapiens
GSIDTDPPA

SEQ ID NO: 877 - protein, 9 aa, Homo sapiens
FHGPAFSTL

SEQ ID NO: 878 - protein, 9 aa, Homo sapiens
VLVPEAHPN

SEQ ID NO: 879 - protein, 9 aa, Homo sapiens
RLWGAPLQP

SEQ ID NO: 880 - protein, 9 aa, Homo sapiens
PMALSRTPT

SEQ ID NO: 881 - protein, 9 aa, Homo sapiens
VTPTCATPA

SEQ ID NO: 882 - protein, 9 aa, Homo sapiens
RAVTPTCAT

SEQ ID NO: 883 - protein, 9 aa, Homo sapiens
GPSNPLCCC

SEQ ID NO: 884 - protein, 9 aa, Homo sapiens
TLGVVPQAS

SEQ ID NO: 885 - protein, 9 aa, Homo sapiens
SLHSACCSG

SEQ ID NO: 886 - protein, 9 aa, Homo sapiens
ATPAGPMPC

SEQ ID NO: 887 - protein, 9 aa, Homo sapiens
WARRTSRAV

SEQ ID NO: 888 - protein, 9 aa, Homo sapiens
NASLTMYVC

SEQ ID NO: 889 - protein, 9 aa, Homo sapiens
SGDPASYRL

SEQ ID NO: 890 - protein, 9 aa, Homo sapiens
VPHPDPPMA

SEQ ID NO: 891 - protein, 9 aa, Homo sapiens
PNASLTMYV

SEQ ID NO: 892 - protein, 9 aa, Homo sapiens
AQWEPVLVP

SEQ ID NO: 893 - protein, 9 aa, Homo sapiens
THPAQWEPV

SEQ ID NO: 894 - protein, 9 aa, Homo sapiens
HPIYDLSQV

SEQ ID NO: 895 - protein, 9 aa, Homo sapiens
SLTMYVCAP

SEQ ID NO: 896 - protein, 9 aa, Homo sapiens
RLPPSLRCS

SEQ ID NO: 897 - protein, 9 aa, Homo sapiens
LFPQEAFPA

SEQ ID NO: 898 - protein, 9 aa, Homo sapiens
SACCSGDPA

SEQ ID NO: 899 - protein, 9 aa, Homo sapiens
RCSLHSACC

SEQ ID NO: 900 - protein, 9 aa, Homo sapiens
CFHGPAFST

SEQ ID NO: 901 - protein, 9 aa, Homo sapiens
LCCCFHGPA

SEQ ID NO: 902 - protein, 9 aa, Homo sapiens
PASYRLWGA

SEQ ID NO: 903 - protein, 9 aa, Homo sapiens
PAQWEPVLV

SEQ ID NO: 904 - protein, 9 aa, Homo sapiens
RTTTWARRT

SEQ ID NO: 905 - protein, 9 aa, Homo sapiens
TPTRQIGSI

SEQ ID NO: 906 - protein, 9 aa, Homo sapiens
FPQEAFPAH

SEQ ID NO: 907 - protein, 9 aa, Homo sapiens
PQASVPLLT

SEQ ID NO: 908 - protein, 9 aa, Homo sapiens
ALSRTPTRQ

SEQ ID NO: 909 - protein, 9 aa, Homo sapiens
TMYVCAPVP

SEQ ID NO: 910 - protein, 9 aa, Homo sapiens
YVCAPVPHP

SEQ ID NO: 911 - protein, 9 aa, Homo sapiens
PTLGVVPQA

SEQ ID NO: 912 - protein, 9 aa, Homo sapiens
VVSPAPSRG

SEQ ID NO: 913 - protein, 9 aa, Homo sapiens
NPLCCCFHG

SEQ ID NO: 914 - protein, 9 aa, Homo sapiens
HLFPQEAFP

SEQ ID NO: 915 - protein, 9 aa, Homo sapiens
CCFHGPAFS

SEQ ID NO: 916 - protein, 9 aa, Homo sapiens
PVPHPDPPM

SEQ ID NO: 917 - protein, 9 aa, Homo sapiens
PEAHPNASL

SEQ ID NO: 918 - protein, 9 aa, Homo sapiens
STLNPVLRH

SEQ ID NO: 919 - protein, 9 aa, Homo sapiens
DPPMALSRT

SEQ ID NO: 920 - protein, 9 aa, Homo sapiens
EAHPNASLT

SEQ ID NO: 921 - protein, 9 aa, Homo sapiens
ADGPSNPLC

SEQ ID NO: 922 - protein, 9 aa, Homo sapiens
PAPSRGQAL

SEQ ID NO: 923 - protein, 9 aa, Homo sapiens
AFSTLNPVL

SEQ ID NO: 924 - protein, 9 aa, Homo sapiens
PLLTHPAQW

SEQ ID NO: 925 - protein, 9 aa, Homo sapiens
LRHLFPQEA

SEQ ID NO: 926 - protein, 9 aa, Homo sapiens
SPAPSRGQA

SEQ ID NO: 927 - protein, 9 aa, Homo sapiens
TCATPAGPM

SEQ ID NO: 928 - protein, 9 aa, Homo sapiens
LWGAPLQPT

SEQ ID NO: 929 - protein, 9 aa, Homo sapiens
VLRHLFPQE

SEQ ID NO: 930 - protein, 9 aa, Homo sapiens
SQVWSVVSP

SEQ ID NO: 931 - protein, 9 aa, Homo sapiens
AHPNASLTM

SEQ ID NO: 932 - protein, 9 aa, Homo sapiens
PCSRLPPSL

SEQ ID NO: 933 - protein, 9 aa, Homo sapiens
SNPLCCCFH

SEQ ID NO: 934 - protein, 9 aa, Homo sapiens
LTHPAQWEP

SEQ ID NO: 935 - protein, 9 aa, Homo sapiens
PADGPSNPL

SEQ ID NO: 936 - protein, 9 aa, Homo sapiens
SRLPPSLRC

SEQ ID NO: 937 - protein, 9 aa, Homo sapiens
TSRAVTPTC

SEQ ID NO: 938 - protein, 9 aa, Homo sapiens
DGPSNPLCC

SEQ ID NO: 939 - protein, 9 aa, Homo sapiens
QASVPLLTH

SEQ ID NO: 940 - protein, 9 aa, Homo sapiens
WSVVSPAPS

SEQ ID NO: 941 - protein, 9 aa, Homo sapiens
CSGDPASYR

SEQ ID NO: 942 - protein, 9 aa, Homo sapiens
QIGSIDTDP

SEQ ID NO: 943 - protein, 9 aa, Homo sapiens
HPAQWEPVL

SEQ ID NO: 944 - protein, 9 aa, Homo sapiens
MPCSRLPPS

SEQ ID NO: 945 - protein, 9 aa, Homo sapiens
CSLHSACCS

SEQ ID NO: 946 - protein, 9 aa, Homo sapiens
LSRTPTRQI

SEQ ID NO: 947 - protein, 9 aa, Homo sapiens
TTWARRTSR

SEQ ID NO: 948 - protein, 9 aa, Homo sapiens
RQIGSIDTD

SEQ ID NO: 949 - protein, 9 aa, Homo sapiens
PVLRHLFPQ

SEQ ID NO: 950 - protein, 9 aa, Homo sapiens
PHPDPPMAL

SEQ ID NO: 951 - protein, 9 aa, Homo sapiens
SVVSPAPSR

SEQ ID NO: 952 - protein, 9 aa, Homo sapiens
LLPSLRCSL

SEQ ID NO: 953 - protein, 9 aa, Homo sapiens
RLLPSLRCS

SEQ ID NO: 954 - protein, 9 aa, Homo sapiens
GPMPCSRLL

SEQ ID NO: 955 - protein, 9 aa, Homo sapiens
PCSRLLPSL

SEQ ID NO: 956 - protein, 9 aa, Homo sapiens
SRLLPSLRC

SEQ ID NO: 957 - protein, 9 aa, Homo sapiens
MPCSRLLPS

SEQ ID NO: 958 - protein, 9 aa, Homo sapiens
LPSLRCSLH

SEQ ID NO: 959 - protein, 9 aa, Homo sapiens
PMPCSRLLP

SEQ ID NO: 960 - protein, 9 aa, Homo sapiens
CSRLLPSLR

SEQ ID NO: 961 - protein, 9 aa, Homo sapiens
SGDPASSRL

SEQ ID NO: 962 - protein, 9 aa, Homo sapiens
PASSRLWGA

SEQ ID NO: 963 - protein, 9 aa, Homo sapiens
SSRLWGAPL

SEQ ID NO: 964 - protein, 9 aa, Homo sapiens
CCSGDPASS

SEQ ID NO: 965 - protein, 9 aa, Homo sapiens
CSGDPASSR

SEQ ID NO: 966 - protein, 9 aa, Homo sapiens
DPASSRLWG

SEQ ID NO: 967 - protein, 9 aa, Homo sapiens
ASSRLWGAP

SEQ ID NO: 968 - protein, 9 aa, Homo sapiens
GDPASSRLW

SEQ ID NO: 969 - protein, 9 aa, Homo sapiens
SRLWGAPLQ

SEQ ID NO: 970 - protein, 9 aa, Homo sapiens
LLTDPAQWE

SEQ ID NO: 971 - protein, 9 aa, Homo sapiens
SVPLLTDPA

SEQ ID NO: 972 - protein, 9 aa, Homo sapiens
TDPAQWEPV

SEQ ID NO: 973 - protein, 9 aa, Homo sapiens
PLLTDPAQW

SEQ ID NO: 974 - protein, 9 aa, Homo sapiens
DPAQWEPVL

SEQ ID NO: 975 - protein, 9 aa, Homo sapiens
LTDPAQWEP

SEQ ID NO: 976 - protein, 9 aa, Homo sapiens
VPLLTDPAQ

SEQ ID NO: 977 - protein, 9 aa, Homo sapiens
QASVPLLTD

SEQ ID NO: 978 - protein, 9 aa, Homo sapiens
ASVPLLTDP

SEQ ID NO: 979 - protein, 9 aa, Homo sapiens
DLAQWEPVL

SEQ ID NO: 980 - protein, 9 aa, Homo sapiens
LLTDLAQWE

SEQ ID NO: 981 - protein, 9 aa, Homo sapiens
ASVPLLTDL

SEQ ID NO: 982 - protein, 9 aa, Homo sapiens
TDLAQWEPV

SEQ ID NO: 983 - protein, 9 aa, Homo sapiens
SVPLLTDLA

SEQ ID NO: 984 - protein, 9 aa, Homo sapiens
PLLTDLAQW

SEQ ID NO: 985 - protein, 9 aa, Homo sapiens
LTDLAQWEP

SEQ ID NO: 986 - protein, 9 aa, Homo sapiens
VPLLTDLAQ

SEQ ID NO: 987 - protein, 9 aa, Homo sapiens
LAQWEPVLV

SEQ ID NO: 988 - protein, 9 aa, Homo sapiens
SVPLLTHLA

SEQ ID NO: 989 - protein, 9 aa, Homo sapiens
ASVPLLTHL

SEQ ID NO: 990 - protein, 9 aa, Homo sapiens
HLAQWEPVL

SEQ ID NO: 991 - protein, 9 aa, Homo sapiens
THLAQWEPV

SEQ ID NO: 992 - protein, 9 aa, Homo sapiens
LLTHLAQWE

SEQ ID NO: 993 - protein, 9 aa, Homo sapiens
PLLTHLAQW

SEQ ID NO: 994 - protein, 9 aa, Homo sapiens
LTHLAQWEP

SEQ ID NO: 995 - protein, 9 aa, Homo sapiens
VPLLTHLAQ

SEQ ID NO: 996 - protein, 9 aa, Homo sapiens
LTMYVCTPV

SEQ ID NO: 997 - protein, 9 aa, Homo sapiens
ASLTMYVCT

SEQ ID NO: 998 - protein, 9 aa, Homo sapiens
SLTMYVCTP

SEQ ID NO: 999 - protein, 9 aa, Homo sapiens
TMYVCTPVP

SEQ ID NO: 1000 - protein, 9 aa, Homo sapiens
YVCTPVPHP

SEQ ID NO: 1001 - protein, 9 aa, Homo sapiens
CTPVPHPDP

SEQ ID NO: 1002 - protein, 9 aa, Homo sapiens
VCTPVPHPD

SEQ ID NO: 1003 - protein, 9 aa, Homo sapiens
MYVCTPVPH

SEQ ID NO: 1004 - protein, 9 aa, Homo sapiens
TPTRQISSI

SEQ ID NO: 1005 - protein, 9 aa, Homo sapiens
SSIDTDPPA

SEQ ID NO: 1006 - protein, 9 aa, Homo sapiens
QISSIDTDP

SEQ ID NO: 1007 - protein, 9 aa, Homo sapiens
RQISSIDTD

SEQ ID NO: 1008 - protein, 9 aa, Homo sapiens
TRQISSIDT

SEQ ID NO: 1009 - protein, 9 aa, Homo sapiens
RTPTRQISS

SEQ ID NO: 1010 - protein, 9 aa, Homo sapiens
ISSIDTDPP

SEQ ID NO: 1011 - protein, 9 aa, Homo sapiens
SRTPTRQIS

SEQ ID NO: 1012 - protein, 9 aa, Homo sapiens
PTRQISSID

SEQ ID NO: 1013 - protein, 9 aa, Homo sapiens
SSSDTDPPA

SEQ ID NO: 1014 - protein, 9 aa, Homo sapiens
QISSSDTDP

SEQ ID NO: 1015 - protein, 9 aa, Homo sapiens
TPTRQISSS

SEQ ID NO: 1016 - protein, 9 aa, Homo sapiens
TRQISSSDT

SEQ ID NO: 1017 - protein, 9 aa, Homo sapiens
RQISSSDTD

SEQ ID NO: 1018 - protein, 9 aa, Homo sapiens
ISSSDTDPP

SEQ ID NO: 1019 - protein, 9 aa, Homo sapiens
PTRQISSSD

SEQ ID NO: 1020 - protein, 9 aa, Homo sapiens
GSSDTDPPA

SEQ ID NO: 1021 - protein, 9 aa, Homo sapiens
QIGSSDTDP

SEQ ID NO: 1022 - protein, 9 aa, Homo sapiens
TRQIGSSDT

SEQ ID NO: 1023 - protein, 9 aa, Homo sapiens
RQIGSSDTD

SEQ ID NO: 1024 - protein, 9 aa, Homo sapiens
SDTDPPADG

SEQ ID NO: 1025 - protein, 9 aa, Homo sapiens
TPTRQIGSS

SEQ ID NO: 1026 - protein, 9 aa, Homo sapiens
IGSSDTDPP

SEQ ID NO: 1027 - protein, 9 aa, Homo sapiens
SSDTDPPAD

SEQ ID NO: 1028 - protein, 9 aa, Homo sapiens
PTRQIGSSD

SEQ ID NO: 1029 - protein, 9 aa, Homo sapiens
SRGQALRRA

SEQ ID NO: 1030 - protein, 9 aa, Homo sapiens
RGQALRRAQ

SEQ ID NO: 1031 - protein, 10 aa, Homo sapiens
VLLALLMAGL

SEQ ID NO: 1032 - protein, 10 aa, Homo sapiens
LLCYSCKAQV

SEQ ID NO: 1033 - protein, 10 aa, Homo sapiens
ALLPALGLLL

SEQ ID NO: 1034 - protein, 10 aa, Homo sapiens
CVDDSQDYYV

SEQ ID NO: 1035 - protein, 10 aa, Homo sapiens
ILALLPALGL

SEQ ID NO: 1036 - protein, 10 aa, Homo sapiens
CLQVENCTQL

SEQ ID NO: 1037 - protein, 10 aa, Homo sapiens
GLALQPGTAL

SEQ ID NO: 1038 - protein, 10 aa, Homo sapiens
GLLTVISKGC

SEQ ID NO: 1039 - protein, 10 aa, Homo sapiens
TQLGEQCWTA

SEQ ID NO: 1040 - protein, 10 aa, Homo sapiens
GLLLWGPGQL

SEQ ID NO: 1041 - protein, 10 aa, Homo sapiens
LQPAAAILAL

SEQ ID NO: 1042 - protein, 10 aa, Homo sapiens
QVSNEDCLQV

SEQ ID NO: 1043 - protein, 10 aa, Homo sapiens
ALQPAAAILA

SEQ ID NO: 1044 - protein, 10 aa, Homo sapiens
ALQPGTALLC

SEQ ID NO: 1045 - protein, 10 aa, Homo sapiens
YVGKKNITCC

SEQ ID NO: 1046 - protein, 10 aa, Homo sapiens
LALLMAGLAL

SEQ ID NO: 1047 - protein, 10 aa, Homo sapiens
LALQPGTALL

SEQ ID NO: 1048 - protein, 10 aa, Homo sapiens
QCWTARIRAV

SEQ ID NO: 1049 - protein, 10 aa, Homo sapiens
RIRAVGLLTV

SEQ ID NO: 1050 - protein, 10 aa, Homo sapiens
WTARIRAVGL

SEQ ID NO: 1051 - protein, 10 aa, Homo sapiens
VISKGCSLNC

SEQ ID NO: 1052 - protein, 10 aa, Homo sapiens
LLALLMAGLA

SEQ ID NO: 1053 - protein, 10 aa, Homo sapiens
AAILALLPAL

SEQ ID NO: 1054 - protein, 10 aa, Homo sapiens
CTQLGEQCWT

SEQ ID NO: 1055 - protein, 10 aa, Homo sapiens
LALLPALGLL

SEQ ID NO: 1056 - protein, 10 aa, Homo sapiens
KAVLLALLMA

SEQ ID NO: 1057 - protein, 10 aa, Homo sapiens
KAQVSNEDCL

SEQ ID NO: 1058 - protein, 10 aa, Homo sapiens
LTVISKGCSL

SEQ ID NO: 1059 - protein, 10 aa, Homo sapiens
KNITCCDTDL

SEQ ID NO: 1060 - protein, 10 aa, Homo sapiens
DLCNASGAHA

SEQ ID NO: 1061 - protein, 10 aa, Homo sapiens
NITCCDTDLC

SEQ ID NO: 1062 - protein, 10 aa, Homo sapiens
QPAAAILALL

SEQ ID NO: 1063 - protein, 10 aa, Homo sapiens
TCCDTDLCNA

SEQ ID NO: 1064 - protein, 10 aa, Homo sapiens
LLPALGLLLW

SEQ ID NO: 1065 - protein, 10 aa, Homo sapiens
TALLCYSCKA

SEQ ID NO: 1066 - protein, 10 aa, Homo sapiens
LCNASGAHAL

SEQ ID NO: 1067 - protein, 10 aa, Homo sapiens
LMAGLALQPG

SEQ ID NO: 1068 - protein, 10 aa, Homo sapiens
MAGLALQPGT

SEQ ID NO: 1069 - protein, 10 aa, Homo sapiens
AAAILALLPA

SEQ ID NO: 1070 - protein, 10 aa, Homo sapiens
ALLMAGLALQ

SEQ ID NO: 1071 - protein, 10 aa, Homo sapiens
QLGEQCWTAR

SEQ ID NO: 1072 - protein, 10 aa, Homo sapiens
LLMAGLALQP

SEQ ID NO: 1073 - protein, 10 aa, Homo sapiens
ASGAHALQPA

SEQ ID NO: 1074 - protein, 10 aa, Homo sapiens
GAHALQPAAA

SEQ ID NO: 1075 - protein, 10 aa, Homo sapiens
ISKGCSLNCV

SEQ ID NO: 1076 - protein, 10 aa, Homo sapiens
AVLLALLMAG

SEQ ID NO: 1077 - protein, 10 aa, Homo sapiens
ALLCYSCKAQ

SEQ ID NO: 1078 - protein, 10 aa, Homo sapiens
LQVENCTQLG

SEQ ID NO: 1079 - protein, 10 aa, Homo sapiens
QDYYVGKKNI

SEQ ID NO: 1080 - protein, 10 aa, Homo sapiens
NEDCLQVENC

SEQ ID NO: 1081 - protein, 10 aa, Homo sapiens
AILALLPALG

SEQ ID NO: 1082 - protein, 10 aa, Homo sapiens
EQCWTARIRA

SEQ ID NO: 1083 - protein, 10 aa, Homo sapiens
SGAHALQPAA

SEQ ID NO: 1084 - protein, 10 aa, Homo sapiens
LQPGTALLCY

SEQ ID NO: 1085 - protein, 10 aa, Homo sapiens
ALGLLLWGPG

SEQ ID NO: 1086 - protein, 10 aa, Homo sapiens
LLTVISKGCS

SEQ ID NO: 1087 - protein, 10 aa, Homo sapiens
AGLALQPGTA

SEQ ID NO: 1088 - protein, 10 aa, Homo sapiens
HALQPAAAIL

SEQ ID NO: 1089 - protein, 10 aa, Homo sapiens
SLNCVDDSQD

SEQ ID NO: 1090 - protein, 10 aa, Homo sapiens
MKAVLLALLM

SEQ ID NO: 1091 - protein, 10 aa, Homo sapiens
LPALGLLLWG

SEQ ID NO: 1092 - protein, 10 aa, Homo sapiens
LGEQCWTARI

SEQ ID NO: 1093 - protein, 10 aa, Homo sapiens
AHALQPAAAI

SEQ ID NO: 1094 - protein, 10 aa, Homo sapiens
VGLLTVISKG

SEQ ID NO: 1095 - protein, 10 aa, Homo sapiens
TARIRAVGLL

SEQ ID NO: 1096 - protein, 10 aa, Homo sapiens
TVISKGCSLN

SEQ ID NO: 1097 - protein, 10 aa, Homo sapiens
QPGTALLCYS

SEQ ID NO: 1098 - protein, 10 aa, Homo sapiens
NCVDDSQDYY

SEQ ID NO: 1099 - protein, 10 aa, Homo sapiens
CKAQVSNEDC

SEQ ID NO: 1100 - protein, 10 aa, Homo sapiens
YYVGKKNITC

SEQ ID NO: 1101 - protein, 10 aa, Homo sapiens
SQDYYVGKKN

SEQ ID NO: 1102 - protein, 10 aa, Homo sapiens
AVGLLTVISK

SEQ ID NO: 1103 - protein, 10 aa, Homo sapiens
IRAVGLLTVI

SEQ ID NO: 1104 - protein, 10 aa, Homo sapiens
DTDLCNASGA

SEQ ID NO: 1105 - protein, 10 aa, Homo sapiens
ITCCDTDLCN

SEQ ID NO: 1106 - protein, 10 aa, Homo sapiens
AQVSNEDCLQ

SEQ ID NO: 1107 - protein, 10 aa, Homo sapiens
ENCTQLGEQC

SEQ ID NO: 1108 - protein, 10 aa, Homo sapiens
LCYSCKAQVS

SEQ ID NO: 1109 - protein, 10 aa, Homo sapiens
ARIRAVGLLT

SEQ ID NO: 1110 - protein, 10 aa, Homo sapiens
YSCKAQVSNE

SEQ ID NO: 1111 - protein, 10 aa, Homo sapiens
LNCVDDSQDY

SEQ ID NO: 1112 - protein, 10 aa, Homo sapiens
EDCLQVENCT

SEQ ID NO: 1113 - protein, 10 aa, Homo sapiens
PGTALLCYSC

SEQ ID NO: 1114 - protein, 10 aa, Homo sapiens
VSNEDCLQVE

SEQ ID NO: 1115 - protein, 10 aa, Homo sapiens
LGLLLWGPGQ

SEQ ID NO: 1116 - protein, 10 aa, Homo sapiens
GCSLNCVDDS

SEQ ID NO: 1117 - protein, 10 aa, Homo sapiens
NCTQLGEQCW

SEQ ID NO: 1118 - protein, 10 aa, Homo sapiens
RAVGLLTVIS

SEQ ID NO: 1119 - protein, 10 aa, Homo sapiens
CDTDLCNASG

SEQ ID NO: 1120 - protein, 10 aa, Homo sapiens
GKKNITCCDT

SEQ ID NO: 1121 - protein, 10 aa, Homo sapiens
KGCSLNCVDD

SEQ ID NO: 1122 - protein, 10 aa, Homo sapiens
GTALLCYSCK

SEQ ID NO: 1123 - protein, 10 aa, Homo sapiens
PALGLLLWGP

SEQ ID NO: 1124 - protein, 10 aa, Homo sapiens
NASGAHALQP

SEQ ID NO: 1125 - protein, 10 aa, Homo sapiens
CCDTDLCNAS

SEQ ID NO: 1126 - protein, 10 aa, Homo sapiens
CSLNCVDDSQ

SEQ ID NO: 1127 - protein, 10 aa, Homo sapiens
VENCTQLGEQ

SEQ ID NO: 1128 - protein, 10 aa, Homo sapiens
SNEDCLQVEN

SEQ ID NO: 1129 - protein, 10 aa, Homo sapiens
DYYVGKKNIT

SEQ ID NO: 1130 - protein, 10 aa, Homo sapiens
CNASGAHALQ

SEQ ID NO: 1131 - protein, 10 aa, Homo sapiens
RLWGAPLQPT

SEQ ID NO: 1132 - protein, 10 aa, Homo sapiens
TLGVVPQASV

SEQ ID NO: 1133 - protein, 10 aa, Homo sapiens
SLTMYVCAPV

SEQ ID NO: 1134 - protein, 10 aa, Homo sapiens
RLPPSLRCSL

SEQ ID NO: 1135 - protein, 10 aa, Homo sapiens
VLVPEAHPNA

SEQ ID NO: 1136 - protein, 10 aa, Homo sapiens
VVPQASVPLL

SEQ ID NO: 1137 - protein, 10 aa, Homo sapiens
HLFPQEAFPA

SEQ ID NO: 1138 - protein, 10 aa, Homo sapiens
VLRHLFPQEA

SEQ ID NO: 1139 - protein, 10 aa, Homo sapiens
ALSRTPTRQI

SEQ ID NO: 1140 - protein, 10 aa, Homo sapiens
GVVPQASVPL

SEQ ID NO: 1141 - protein, 10 aa, Homo sapiens
LTHPAQWEPV

SEQ ID NO: 1142 - protein, 10 aa, Homo sapiens
SQVWSVVSPA

SEQ ID NO: 1143 - protein, 10 aa, Homo sapiens
YDLSQVWSVV

SEQ ID NO: 1144 - protein, 10 aa, Homo sapiens
GPAFSTLNPV

SEQ ID NO: 1145 - protein, 10 aa, Homo sapiens
CCFHGPAFST

SEQ ID NO: 1146 - protein, 10 aa, Homo sapiens
GAPLQPTLGV

SEQ ID NO: 1147 - protein, 10 aa, Homo sapiens
TTWARRTSRA

SEQ ID NO: 1148 - protein, 10 aa, Homo sapiens
CSGDPASYRL

SEQ ID NO: 1149 - protein, 10 aa, Homo sapiens
STLNPVLRHL

SEQ ID NO: 1150 - protein, 10 aa, Homo sapiens
ASYRLWGAPL

SEQ ID NO: 1151 - protein, 10 aa, Homo sapiens
AVTPTCATPA

SEQ ID NO: 1152 - protein, 10 aa, Homo sapiens
SLRCSLHSAC

SEQ ID NO: 1153 - protein, 10 aa, Homo sapiens
MPCSRLPPSL

SEQ ID NO: 1154 - protein, 10 aa, Homo sapiens
VPHPDPPMAL

SEQ ID NO: 1155 - protein, 10 aa, Homo sapiens
APLQPTLGVV

SEQ ID NO: 1156 - protein, 10 aa, Homo sapiens
LLTHPAQWEP

SEQ ID NO: 1157 - protein, 10 aa, Homo sapiens
TMYVCAPVPH

SEQ ID NO: 1158 - protein, 10 aa, Homo sapiens
SPAPSRGQAL

SEQ ID NO: 1159 - protein, 10 aa, Homo sapiens
AQWEPVLVPE

SEQ ID NO: 1160 - protein, 10 aa, Homo sapiens
IYDLSQVWSV

SEQ ID NO: 1161 - protein, 10 aa, Homo sapiens
AHPIYDLSQV

SEQ ID NO: 1162 - protein, 10 aa, Homo sapiens
NASLTMYVCA

SEQ ID NO: 1163 - protein, 10 aa, Homo sapiens
HPNASLTMYV

SEQ ID NO: 1164 - protein, 10 aa, Homo sapiens
VPQASVPLLT

SEQ ID NO: 1165 - protein, 10 aa, Homo sapiens
QPTLGVVPQA

SEQ ID NO: 1166 - protein, 10 aa, Homo sapiens
TLNPVLRHLF

SEQ ID NO: 1167 - protein, 10 aa, Homo sapiens
CATPAGPMPC

SEQ ID NO: 1168 - protein, 10 aa, Homo sapiens
RTSRAVTPTC

SEQ ID NO: 1169 - protein, 10 aa, Homo sapiens
IGSIDTDPPA

SEQ ID NO: 1170 - protein, 10 aa, Homo sapiens
PLCCCFHGPA

SEQ ID NO: 1171 - protein, 10 aa, Homo sapiens
LVPEAHPNAS

SEQ ID NO: 1172 - protein, 10 aa, Homo sapiens
RTPTRQIGSI

SEQ ID NO: 1173 - protein, 10 aa, Homo sapiens
DPASYRLWGA

SEQ ID NO: 1174 - protein, 10 aa, Homo sapiens
AFPAHPIYDL

SEQ ID NO: 1175 - protein, 10 aa, Homo sapiens
ASVPLLTHPA

SEQ ID NO: 1176 - protein, 10 aa, Homo sapiens
APVPHPDPPM

SEQ ID NO: 1177 - protein, 10 aa, Homo sapiens
CFHGPAFSTL

SEQ ID NO: 1178 - protein, 10 aa, Homo sapiens
PIYDLSQVWS

SEQ ID NO: 1179 - protein, 10 aa, Homo sapiens
HPAQWEPVLV

SEQ ID NO: 1180 - protein, 10 aa, Homo sapiens
VPEAHPNASL

SEQ ID NO: 1181 - protein, 10 aa, Homo sapiens
SLHSACCSGD

SEQ ID NO: 1182 - protein, 10 aa, Homo sapiens
WARRTSRAVT

SEQ ID NO: 1183 - protein, 10 aa, Homo sapiens
PPADGPSNPL

SEQ ID NO: 1184 - protein, 10 aa, Homo sapiens
QVWSVVSPAP

SEQ ID NO: 1185 - protein, 10 aa, Homo sapiens
PAFSTLNPVL

SEQ ID NO: 1186 - protein, 10 aa, Homo sapiens
PVPHPDPPMA

SEQ ID NO: 1187 - protein, 10 aa, Homo sapiens
VSPAPSRGQA

SEQ ID NO: 1188 - protein, 10 aa, Homo sapiens
FPQEAFPAHP

SEQ ID NO: 1189 - protein, 10 aa, Homo sapiens
ADGPSNPLCC

SEQ ID NO: 1190 - protein, 10 aa, Homo sapiens
PLLTHPAQWE

SEQ ID NO: 1191 - protein, 10 aa, Homo sapiens
PAGPMPCSRL

SEQ ID NO: 1192 - protein, 10 aa, Homo sapiens
SVVSPAPSRG

SEQ ID NO: 1193 - protein, 10 aa, Homo sapiens
THPAQWEPVL

SEQ ID NO: 1194 - protein, 10 aa, Homo sapiens
PSLRCSLHSA

SEQ ID NO: 1195 - protein, 10 aa, Homo sapiens
YVCAPVPHPD

SEQ ID NO: 1196 - protein, 10 aa, Homo sapiens
LQPTLGVVPQ

SEQ ID NO: 1197 - protein, 10 aa, Homo sapiens
DGPSNPLCCC

SEQ ID NO: 1198 - protein, 10 aa, Homo sapiens
EAHPNASLTM

SEQ ID NO: 1199 - protein, 10 aa, Homo sapiens
FSTLNPVLRH

SEQ ID NO: 1200 - protein, 10 aa, Homo sapiens
LWGAPLQPTL

SEQ ID NO: 1201 - protein, 10 aa, Homo sapiens
SIDTDPPADG

SEQ ID NO: 1202 - protein, 10 aa, Homo sapiens
PPMALSRTPT

SEQ ID NO: 1203 - protein, 10 aa, Homo sapiens
WEPVLVPEAH

SEQ ID NO: 1204 - protein, 10 aa, Homo sapiens
PEAHPNASLT

SEQ ID NO: 1205 - protein, 10 aa, Homo sapiens
VPLLTHPAQW

SEQ ID NO: 1206 - protein, 10 aa, Homo sapiens
SNPLCCCFHG

SEQ ID NO: 1207 - protein, 10 aa, Homo sapiens
PMPCSRLPPS

SEQ ID NO: 1208 - protein, 10 aa, Homo sapiens
CCCFHGPAFS

SEQ ID NO: 1209 - protein, 10 aa, Homo sapiens
MTHRTTTWAR

SEQ ID NO: 1210 - protein, 10 aa, Homo sapiens
TSRAVTPTCA

SEQ ID NO: 1211 - protein, 10 aa, Homo sapiens
CSRLPPSLRC

SEQ ID NO: 1212 - protein, 10 aa, Homo sapiens
RRTSRAVTPT

SEQ ID NO: 1213 - protein, 10 aa, Homo sapiens
ATPAGPMPCS

SEQ ID NO: 1214 - protein, 10 aa, Homo sapiens
DLSQVWSVVS

SEQ ID NO: 1215 - protein, 10 aa, Homo sapiens
WGAPLQPTLG

SEQ ID NO: 1216 - protein, 10 aa, Homo sapiens
TWARRTSRAV

SEQ ID NO: 1217 - protein, 10 aa, Homo sapiens
CSLHSACCSG

SEQ ID NO: 1218 - protein, 10 aa, Homo sapiens
VTPTCATPAG

SEQ ID NO: 1219 - protein, 10 aa, Homo sapiens
FPAHPIYDLS

SEQ ID NO: 1220 - protein, 10 aa, Homo sapiens
RQIGSIDTDP

SEQ ID NO: 1221 - protein, 10 aa, Homo sapiens
PQEAFPAHPI

SEQ ID NO: 1222 - protein, 10 aa, Homo sapiens
SVPLLTHPAQ

SEQ ID NO: 1223 - protein, 10 aa, Homo sapiens
MALSRTPTRQ

SEQ ID NO: 1224 - protein, 10 aa, Homo sapiens
NPVLRHLFPQ

SEQ ID NO: 1225 - protein, 10 aa, Homo sapiens
LRCSLHSACC

SEQ ID NO: 1226 - protein, 10 aa, Homo sapiens
SRAVTPTCAT

SEQ ID NO: 1227 - protein, 10 aa, Homo sapiens
SACCSGDPAS

SEQ ID NO: 1228 - protein, 10 aa, Homo sapiens
QIGSIDTDPP

SEQ ID NO: 1229 - protein, 10 aa, Homo sapiens
LNPVLRHLFP

SEQ ID NO: 1230 - protein, 10 aa, Homo sapiens
FHGPAFSTLN

SEQ ID NO: 1231 - protein, 10 aa, Homo sapiens
RLLPSLRCSL

SEQ ID NO: 1232 - protein, 10 aa, Homo sapiens
MPCSRLLPSL

SEQ ID NO: 1233 - protein, 10 aa, Homo sapiens
LLPSLRCSLH

SEQ ID NO: 1234 - protein, 10 aa, Homo sapiens
AGPMPCSRLL

SEQ ID NO: 1235 - protein, 10 aa, Homo sapiens
PMPCSRLLPS

SEQ ID NO: 1236 - protein, 10 aa, Homo sapiens
CSRLLPSLRC

SEQ ID NO: 1237 - protein, 10 aa, Homo sapiens
LPSLRCSLHS

SEQ ID NO: 1238 - protein, 10 aa, Homo sapiens
GPMPCSRLLP

SEQ ID NO: 1239 - protein, 10 aa, Homo sapiens
SRLLPSLRCS

SEQ ID NO: 1240 - protein, 10 aa, Homo sapiens
PCSRLLPSLR

SEQ ID NO: 1241 - protein, 10 aa, Homo sapiens
CSGDPASSRL

SEQ ID NO: 1242 - protein, 10 aa, Homo sapiens
ASSRLWGAPL

SEQ ID NO: 1243 - protein, 10 aa, Homo sapiens
DPASSRLWGA

SEQ ID NO: 1244 - protein, 10 aa, Homo sapiens
GDPASSRLWG

SEQ ID NO: 1245 - protein, 10 aa, Homo sapiens
ACCSGDPASS

SEQ ID NO: 1246 - protein, 10 aa, Homo sapiens
CCSGDPASSR

SEQ ID NO: 1247 - protein, 10 aa, Homo sapiens
SGDPASSRLW

SEQ ID NO: 1248 - protein, 10 aa, Homo sapiens
SRLWGAPLQP

SEQ ID NO: 1249 - protein, 10 aa, Homo sapiens
SSRLWGAPLQ

SEQ ID NO: 1250 - protein, 10 aa, Homo sapiens
PASSRLWGAP

SEQ ID NO: 1251 - protein, 10 aa, Homo sapiens
LLTDPAQWEP

SEQ ID NO: 1252 - protein, 10 aa, Homo sapiens
LTDPAQWEPV

SEQ ID NO: 1253 - protein, 10 aa, Homo sapiens
DPAQWEPVLV

SEQ ID NO: 1254 - protein, 10 aa, Homo sapiens
ASVPLLTDPA

SEQ ID NO: 1255 - protein, 10 aa, Homo sapiens
TDPAQWEPVL

SEQ ID NO: 1256 - protein, 10 aa, Homo sapiens
PLLTDPAQWE

SEQ ID NO: 1257 - protein, 10 aa, Homo sapiens
VPLLTDPAQW

SEQ ID NO: 1258 - protein, 10 aa, Homo sapiens
SVPLLTDPAQ

SEQ ID NO: 1259 - protein, 10 aa, Homo sapiens
QASVPLLTDP

SEQ ID NO: 1260 - protein, 10 aa, Homo sapiens
PQASVPLLTD

SEQ ID NO: 1261 - protein, 10 aa, Homo sapiens
DLAQWEPVLV

SEQ ID NO: 1262 - protein, 10 aa, Homo sapiens
LLTDLAQWEP

SEQ ID NO: 1263 - protein, 10 aa, Homo sapiens
QASVPLLTDL

SEQ ID NO: 1264 - protein, 10 aa, Homo sapiens
LTDLAQWEPV

SEQ ID NO: 1265 - protein, 10 aa, Homo sapiens
TDLAQWEPVL

SEQ ID NO: 1266 - protein, 10 aa, Homo sapiens
ASVPLLTDLA

SEQ ID NO: 1267 - protein, 10 aa, Homo sapiens
VPLLTDLAQW

SEQ ID NO: 1268 - protein, 10 aa, Homo sapiens
PLLTDLAQWE

SEQ ID NO: 1269 - protein, 10 aa, Homo sapiens
SVPLLTDLAQ

SEQ ID NO: 1270 - protein, 10 aa, Homo sapiens
HLAQWEPVLV

SEQ ID NO: 1271 - protein, 10 aa, Homo sapiens
LTHLAQWEPV

SEQ ID NO: 1272 - protein, 10 aa, Homo sapiens
QASVPLLTHL

SEQ ID NO: 1273 - protein, 10 aa, Homo sapiens
LLTHLAQWEP

SEQ ID NO: 1274 - protein, 10 aa, Homo sapiens
ASVPLLTHLA

SEQ ID NO: 1275 - protein, 10 aa, Homo sapiens
THLAQWEPVL

SEQ ID NO: 1276 - protein, 10 aa, Homo sapiens
VPLLTHLAQW

SEQ ID NO: 1277 - protein, 10 aa, Homo sapiens
PLLTHLAQWE

SEQ ID NO: 1278 - protein, 10 aa, Homo sapiens
SVPLLTHLAQ

SEQ ID NO: 1279 - protein, 10 aa, Homo sapiens
LAQWEPVLVP

SEQ ID NO: 1280 - protein, 10 aa, Homo sapiens
SLTMYVCTPV

SEQ ID NO: 1281 - protein, 10 aa, Homo sapiens
TMYVCTPVPH

SEQ ID NO: 1282 - protein, 10 aa, Homo sapiens
NASLTMYVCT

SEQ ID NO: 1283 - protein, 10 aa, Homo sapiens
TPVPHPDPPM

SEQ ID NO: 1284 - protein, 10 aa, Homo sapiens
YVCTPVPHPD

SEQ ID NO: 1285 - protein, 10 aa, Homo sapiens
ASLTMYVCTP

SEQ ID NO: 1286 - protein, 10 aa, Homo sapiens
LTMYVCTPVP

SEQ ID NO: 1287 - protein, 10 aa, Homo sapiens
VCTPVPHPDP

SEQ ID NO: 1288 - protein, 10 aa, Homo sapiens
CTPVPHPDPP

SEQ ID NO: 1289 - protein, 10 aa, Homo sapiens
MYVCTPVPHP

SEQ ID NO: 1290 - protein, 10 aa, Homo sapiens
RTPTRQISSI

SEQ ID NO: 1291 - protein, 10 aa, Homo sapiens
ISSIDTDPPA

SEQ ID NO: 1292 - protein, 10 aa, Homo sapiens
RQISSIDTDP

SEQ ID NO: 1293 - protein, 10 aa, Homo sapiens
QISSIDTDPP

SEQ ID NO: 1294 - protein, 10 aa, Homo sapiens
SSIDTDPPAD

SEQ ID NO: 1295 - protein, 10 aa, Homo sapiens
PTRQISSIDT

SEQ ID NO: 1296 - protein, 10 aa, Homo sapiens
TPTRQISSID

SEQ ID NO: 1297 - protein, 10 aa, Homo sapiens
LSRTPTRQIS

SEQ ID NO: 1298 - protein, 10 aa, Homo sapiens
SRTPTRQISS

SEQ ID NO: 1299 - protein, 10 aa, Homo sapiens
TRQISSIDTD

SEQ ID NO: 1300 - protein, 10 aa, Homo sapiens
ISSSDTDPPA

SEQ ID NO: 1301 - protein, 10 aa, Homo sapiens
RTPTRQISSS

SEQ ID NO: 1302 - protein, 10 aa, Homo sapiens
RQISSSDTDP

SEQ ID NO: 1303 - protein, 10 aa, Homo sapiens
QISSSDTDPP

SEQ ID NO: 1304 - protein, 10 aa, Homo sapiens
SSSDTDPPAD

SEQ ID NO: 1305 - protein, 10 aa, Homo sapiens
PTRQISSSDT

SEQ ID NO: 1306 - protein, 10 aa, Homo sapiens
TPTRQISSSD

SEQ ID NO: 1307 - protein, 10 aa, Homo sapiens
TRQISSSDTD

SEQ ID NO: 1308 - protein, 10 aa, Homo sapiens
IGSSDTDPPA

SEQ ID NO: 1309 - protein, 10 aa, Homo sapiens
RQIGSSDTDP

SEQ ID NO: 1310 - protein, 10 aa, Homo sapiens
QIGSSDTDPP

SEQ ID NO: 1311 - protein, 10 aa, Homo sapiens
GSSDTDPPAD

SEQ ID NO: 1312 - protein, 10 aa, Homo sapiens
RTPTRQIGSS

SEQ ID NO: 1313 - protein, 10 aa, Homo sapiens
SSDTDPPADG

SEQ ID NO: 1314 - protein, 10 aa, Homo sapiens
PTRQIGSSDT

SEQ ID NO: 1315 - protein, 10 aa, Homo sapiens
TPTRQIGSSD

SEQ ID NO: 1316 - protein, 10 aa, Homo sapiens
SDTDPPADGP

SEQ ID NO: 1317 - protein, 10 aa, Homo sapiens
TRQIGSSDTD

SEQ ID NO: 1318 - protein, 10 aa, Homo sapiens
PSRGQALRRA

SEQ ID NO: 1319 - protein, 10 aa, Homo sapiens
SRGQALRRAQ

SEQ ID NO: 1320 - protein, 9 aa, Homo sapiens
ALLMAGLAL

SEQ ID NO: 1321 - protein, 9 aa, Homo sapiens
SQDYYVGKK

SEQ ID NO: 1322 - protein, 9 aa, Homo sapiens
LLPALGLLL

SEQ ID NO: 1323 - protein, 9 aa, Homo sapiens
LLALLMAGL

SEQ ID NO: 1324 - protein, 9 aa, Homo sapiens
ALQPAAAIL

SEQ ID NO: 1325 - protein, 9 aa, Homo sapiens
ALQPGTALL

SEQ ID NO: 1326 - protein, 9 aa, Homo sapiens
QLGEQCWTA

SEQ ID NO: 1327 - protein, 9 aa, Homo sapiens
ALLCYSCKA

SEQ ID NO: 1328 - protein, 9 aa, Homo sapiens
ALLPALGLL

SEQ ID NO: 1329 - protein, 9 aa, Homo sapiens
CVDDSQDYY

SEQ ID NO: 1330 - protein, 9 aa, Homo sapiens
TALLCYSCK

SEQ ID NO: 1331 - protein, 9 aa, Homo sapiens
LLLWGPGQL

SEQ ID NO: 1332 - protein, 9 aa, Homo sapiens
GLLLWGPGQ

SEQ ID NO: 1333 - protein, 9 aa, Homo sapiens
GLLTVISKG

SEQ ID NO: 1334 - protein, 9 aa, Homo sapiens
VGLLTVISK

SEQ ID NO: 1335 - protein, 9 aa, Homo sapiens
GLALQPGTA

SEQ ID NO: 1336 - protein, 9 aa, Homo sapiens
LLTVISKGC

SEQ ID NO: 1337 - protein, 9 aa, Homo sapiens
AILALLPAL

SEQ ID NO: 1338 - protein, 9 aa, Homo sapiens
QPGTALLCY

SEQ ID NO: 1339 - protein, 9 aa, Homo sapiens
ALGLLLWGP

SEQ ID NO: 1340 - protein, 9 aa, Homo sapiens
VLLALLMAG

SEQ ID NO: 1341 - protein, 9 aa, Homo sapiens
AVLLALLMA

SEQ ID NO: 1342 - protein, 9 aa, Homo sapiens
TVISKGCSL

SEQ ID NO: 1343 - protein, 9 aa, Homo sapiens
GTALLCYSC

SEQ ID NO: 1344 - protein, 9 aa, Homo sapiens
DSQDYYVGK

SEQ ID NO: 1345 - protein, 9 aa, Homo sapiens
NITCCDTDL

SEQ ID NO: 1346 - protein, 9 aa, Homo sapiens
NCVDDSQDY

SEQ ID NO: 1347 - protein, 9 aa, Homo sapiens
LMAGLALQP

SEQ ID NO: 1348 - protein, 9 aa, Homo sapiens
LLMAGLALQ

SEQ ID NO: 1349 - protein, 9 aa, Homo sapiens
LQVENCTQL

SEQ ID NO: 1350 - protein, 9 aa, Homo sapiens
YVGKKNITC

SEQ ID NO: 1351 - protein, 9 aa, Homo sapiens
RIRAVGLLT

SEQ ID NO: 1352 - protein, 9 aa, Homo sapiens
SLNCVDDSQ

SEQ ID NO: 1353 - protein, 9 aa, Homo sapiens
LALLPALGL

SEQ ID NO: 1354 - protein, 9 aa, Homo sapiens
AQVSNEDCL

SEQ ID NO: 1355 - protein, 9 aa, Homo sapiens
RAVGLLTVI

SEQ ID NO: 1356 - protein, 9 aa, Homo sapiens
CLQVENCTQ

SEQ ID NO: 1357 - protein, 9 aa, Homo sapiens
QCWTARIRA

SEQ ID NO: 1358 - protein, 9 aa, Homo sapiens
ILALLPALG

SEQ ID NO: 1359 - protein, 9 aa, Homo sapiens
QPAAAILAL

SEQ ID NO: 1360 - protein, 9 aa, Homo sapiens
LQPGTALLC

SEQ ID NO: 1361 - protein, 9 aa, Homo sapiens
KAVLLALLM

SEQ ID NO: 1362 - protein, 9 aa, Homo sapiens
DLCNASGAH

SEQ ID NO: 1363 - protein, 9 aa, Homo sapiens
GEQCWTARI

SEQ ID NO: 1364 - protein, 9 aa, Homo sapiens
LALQPGTAL

SEQ ID NO: 1365 - protein, 9 aa, Homo sapiens
HALQPAAAI

SEQ ID NO: 1366 - protein, 9 aa, Homo sapiens
LQPAAAILA

SEQ ID NO: 1367 - protein, 9 aa, Homo sapiens
CTQLGEQCW

SEQ ID NO: 1368 - protein, 9 aa, Homo sapiens
ITCCDTDLC

SEQ ID NO: 1369 - protein, 9 aa, Homo sapiens
LLCYSCKAQ

SEQ ID NO: 1370 - protein, 9 aa, Homo sapiens
LCYSCKAQV

SEQ ID NO: 1371 - protein, 9 aa, Homo sapiens
AAILALLPA

SEQ ID NO: 1372 - protein, 9 aa, Homo sapiens
TQLGEQCWT

SEQ ID NO: 1373 - protein, 9 aa, Homo sapiens
LPALGLLLW

SEQ ID NO: 1374 - protein, 9 aa, Homo sapiens
GAHALQPAA

SEQ ID NO: 1375 - protein, 9 aa, Homo sapiens
KAQVSNEDC

SEQ ID NO: 1376 - protein, 9 aa, Homo sapiens
TARIRAVGL

SEQ ID NO: 1377 - protein, 9 aa, Homo sapiens
AVGLLTVIS

SEQ ID NO: 1378 - protein, 9 aa, Homo sapiens
LGEQCWTAR

SEQ ID NO: 1379 - protein, 9 aa, Homo sapiens
EQCWTARIR

SEQ ID NO: 1380 - protein, 9 aa, Homo sapiens
VSNEDCLQV

SEQ ID NO: 1381 - protein, 9 aa, Homo sapiens
ISKGCSLNC

SEQ ID NO: 1382 - protein, 9 aa, Homo sapiens
CCDTDLCNA

SEQ ID NO: 1383 - protein, 9 aa, Homo sapiens
NCTQLGEQC

SEQ ID NO: 1384 - protein, 9 aa, Homo sapiens
QVENCTQLG

SEQ ID NO: 1385 - protein, 9 aa, Homo sapiens
VISKGCSLN

SEQ ID NO: 1386 - protein, 9 aa, Homo sapiens
LCNASGAHA

SEQ ID NO: 1387 - protein, 9 aa, Homo sapiens
QVSNEDCLQ

SEQ ID NO: 1388 - protein, 9 aa, Homo sapiens
WTARIRAVG

SEQ ID NO: 1389 - protein, 9 aa, Homo sapiens
PAAAILALL

SEQ ID NO: 1390 - protein, 9 aa, Homo sapiens
CNASGAHAL

SEQ ID NO: 1391 - protein, 9 aa, Homo sapiens
MKAVLLALL

SEQ ID NO: 1392 - protein, 9 aa, Homo sapiens
LTVISKGCS

SEQ ID NO: 1393 - protein, 9 aa, Homo sapiens
CSLNCVDDS

SEQ ID NO: 1394 - protein, 9 aa, Homo sapiens
LALLMAGLA

SEQ ID NO: 1395 - protein, 9 aa, Homo sapiens
ARIRAVGLL

SEQ ID NO: 1396 - protein, 9 aa, Homo sapiens
DCLQVENCT

SEQ ID NO: 1397 - protein, 9 aa, Homo sapiens
SCKAQVSNE

SEQ ID NO: 1398 - protein, 9 aa, Homo sapiens
VDDSQDYYV

SEQ ID NO: 1399 - protein, 9 aa, Homo sapiens
IRAVGLLTV

SEQ ID NO: 1400 - protein, 9 aa, Homo sapiens
GCSLNCVDD

SEQ ID NO: 1401 - protein, 9 aa, Homo sapiens
DYYVGKKNI

SEQ ID NO: 1402 - protein, 9 aa, Homo sapiens
AAAILALLP

SEQ ID NO: 1403 - protein, 9 aa, Homo sapiens
TCCDTDLCN

SEQ ID NO: 1404 - protein, 9 aa, Homo sapiens
NASGAHALQ

SEQ ID NO: 1405 - protein, 9 aa, Homo sapiens
MAGLALQPG

SEQ ID NO: 1406 - protein, 9 aa, Homo sapiens
VGKKNITCC

SEQ ID NO: 1407 - protein, 9 aa, Homo sapiens
KKNITCCDT

SEQ ID NO: 1408 - protein, 9 aa, Homo sapiens
SKGCSLNCV

SEQ ID NO: 1409 - protein, 9 aa, Homo sapiens
TDLCNASGA

SEQ ID NO: 1410 - protein, 9 aa, Homo sapiens
DTDLCNASG

SEQ ID NO: 1411 - protein, 9 aa, Homo sapiens
SGAHALQPA

SEQ ID NO: 1412 - protein, 9 aa, Homo sapiens
YYVGKKNIT

SEQ ID NO: 1413 - protein, 9 aa, Homo sapiens
AHALQPAAA

SEQ ID NO: 1414 - protein, 9 aa, Homo sapiens
ASGAHALQP

SEQ ID NO: 1415 - protein, 9 aa, Homo sapiens
KNITCCDTD

SEQ ID NO: 1416 - protein, 9 aa, Homo sapiens
EDCLQVENC

SEQ ID NO: 1417 - protein, 9 aa, Homo sapiens
AGLALQPGT

SEQ ID NO: 1418 - protein, 9 aa, Homo sapiens
PALGLLLWG

SEQ ID NO: 1419 - protein, 9 aa, Homo sapiens
VENCTQLGE

SEQ ID NO: 1420 - protein, 9 aa, Homo sapiens
TTWARRTSR

SEQ ID NO: 1421 - protein, 9 aa, Homo sapiens
SVVSPAPSR

SEQ ID NO: 1422 - protein, 9 aa, Homo sapiens
QVWSVVSPA

SEQ ID NO: 1423 - protein, 9 aa, Homo sapiens
RLWGAPLQP

SEQ ID NO: 1424 - protein, 9 aa, Homo sapiens
SLRCSLHSA

SEQ ID NO: 1425 - protein, 9 aa, Homo sapiens
TLNPVLRHL

SEQ ID NO: 1426 - protein, 9 aa, Homo sapiens
SLTMYVCAP

SEQ ID NO: 1427 - protein, 9 aa, Homo sapiens
HLFPQEAFP

SEQ ID NO: 1428 - protein, 9 aa, Homo sapiens
STLNPVLRH

SEQ ID NO: 1429 - protein, 9 aa, Homo sapiens
TMYVCAPVP

SEQ ID NO: 1430 - protein, 9 aa, Homo sapiens
EAFPAHPIY

SEQ ID NO: 1431 - protein, 9 aa, Homo sapiens
DLSQVWSVV

SEQ ID NO: 1432 - protein, 9 aa, Homo sapiens
CCSGDPASY

SEQ ID NO: 1433 - protein, 9 aa, Homo sapiens
VLRHLFPQE

SEQ ID NO: 1434 - protein, 9 aa, Homo sapiens
HPNASLTMY

SEQ ID NO: 1435 - protein, 9 aa, Homo sapiens
VVPQASVPL

SEQ ID NO: 1436 - protein, 9 aa, Homo sapiens
TLGVVPQAS

SEQ ID NO: 1437 - protein, 9 aa, Homo sapiens
MALSRTPTR

SEQ ID NO: 1438 - protein, 9 aa, Homo sapiens
VLVPEAHPN

SEQ ID NO: 1439 - protein, 9 aa, Homo sapiens
AQWEPVLVP

SEQ ID NO: 1440 - protein, 9 aa, Homo sapiens
FPAHPIYDL

SEQ ID NO: 1441 - protein, 9 aa, Homo sapiens
APSRGQALR

SEQ ID NO: 1442 - protein, 9 aa, Homo sapiens
CSRLPPSLR

SEQ ID NO: 1443 - protein, 9 aa, Homo sapiens
LVPEAHPNA

SEQ ID NO: 1444 - protein, 9 aa, Homo sapiens
PLLTHPAQW

SEQ ID NO: 1445 - protein, 9 aa, Homo sapiens
CSGDPASYR

SEQ ID NO: 1446 - protein, 9 aa, Homo sapiens
LLTHPAQWE

SEQ ID NO: 1447 - protein, 9 aa, Homo sapiens
LTMYVCAPV

SEQ ID NO: 1448 - protein, 9 aa, Homo sapiens
FSTLNPVLR

SEQ ID NO: 1449 - protein, 9 aa, Homo sapiens
SLHSACCSG

SEQ ID NO: 1450 - protein, 9 aa, Homo sapiens
SVPLLTHPA

SEQ ID NO: 1451 - protein, 9 aa, Homo sapiens
ATPAGPMPC

SEQ ID NO: 1452 - protein, 9 aa, Homo sapiens
ALSRTPTRQ

SEQ ID NO: 1453 - protein, 9 aa, Homo sapiens
CCCFHGPAF

SEQ ID NO: 1454 - protein, 9 aa, Homo sapiens
VPQASVPLL

SEQ ID NO: 1455 - protein, 9 aa, Homo sapiens
HPAQWEPVL

SEQ ID NO: 1456 - protein, 9 aa, Homo sapiens
RTSRAVTPT

SEQ ID NO: 1457 - protein, 9 aa, Homo sapiens
GVVPQASVP

SEQ ID NO: 1458 - protein, 9 aa, Homo sapiens
GPSNPLCCC

SEQ ID NO: 1459 - protein, 9 aa, Homo sapiens
PLQPTLGVV

SEQ ID NO: 1460 - protein, 9 aa, Homo sapiens
THRTTTWAR

SEQ ID NO: 1461 - protein, 9 aa, Homo sapiens
PTLGVVPQA

SEQ ID NO: 1462 - protein, 9 aa, Homo sapiens
PIYDLSQVW

SEQ ID NO: 1463 - protein, 9 aa, Homo sapiens
VTPTCATPA

SEQ ID NO: 1464 - protein, 9 aa, Homo sapiens
PMALSRTPT

SEQ ID NO: 1465 - protein, 9 aa, Homo sapiens
MTHRTTTWA

SEQ ID NO: 1466 - protein, 9 aa, Homo sapiens
NASLTMYVC

SEQ ID NO: 1467 - protein, 9 aa, Homo sapiens
FPQEAFPAH

SEQ ID NO: 1468 - protein, 9 aa, Homo sapiens
APLQPTLGV

SEQ ID NO: 1469 - protein, 9 aa, Homo sapiens
YVCAPVPHP

SEQ ID NO: 1470 - protein, 9 aa, Homo sapiens
QASVPLLTH

SEQ ID NO: 1471 - protein, 9 aa, Homo sapiens
RLPPSLRCS

SEQ ID NO: 1472 - protein, 9 aa, Homo sapiens
PAGPMPCSR

SEQ ID NO: 1473 - protein, 9 aa, Homo sapiens
PSRGQALRR

SEQ ID NO: 1474 - protein, 9 aa, Homo sapiens
PLCCCFHGP

SEQ ID NO: 1475 - protein, 9 aa, Homo sapiens
LPPSLRCSL

SEQ ID NO: 1476 - protein, 9 aa, Homo sapiens
RHLFPQEAF

SEQ ID NO: 1477 - protein, 9 aa, Homo sapiens
GSIDTDPPA

SEQ ID NO: 1478 - protein, 9 aa, Homo sapiens
HPIYDLSQV

SEQ ID NO: 1479 - protein, 9 aa, Homo sapiens
LTHPAQWEP

SEQ ID NO: 1480 - protein, 9 aa, Homo sapiens
LNPVLRHLF

SEQ ID NO: 1481 - protein, 9 aa, Homo sapiens
RTPTRQIGS

SEQ ID NO: 1482 - protein, 9 aa, Homo sapiens
HRTTTWARR

SEQ ID NO: 1483 - protein, 9 aa, Homo sapiens
PMPCSRLPP

SEQ ID NO: 1484 - protein, 9 aa, Homo sapiens
PVPHPDPPM

SEQ ID NO: 1485 - protein, 9 aa, Homo sapiens
VVSPAPSRG

SEQ ID NO: 1486 - protein, 9 aa, Homo sapiens
QIGSIDTDP

SEQ ID NO: 1487 - protein, 9 aa, Homo sapiens
AVTPTCATP

SEQ ID NO: 1488 - protein, 9 aa, Homo sapiens
VPHPDPPMA

SEQ ID NO: 1489 - protein, 9 aa, Homo sapiens
SGDPASYRL

SEQ ID NO: 1490 - protein, 9 aa, Homo sapiens
FHGPAFSTL

SEQ ID NO: 1491 - protein, 9 aa, Homo sapiens
YDLSQVWSV

SEQ ID NO: 1492 - protein, 9 aa, Homo sapiens
SQVWSVVSP

SEQ ID NO: 1493 - protein, 9 aa, Homo sapiens
TPTRQIGSI

SEQ ID NO: 1494 - protein, 9 aa, Homo sapiens
QEAFPAHPI

SEQ ID NO: 1495 - protein, 9 aa, Homo sapiens
RAVTPTCAT

SEQ ID NO: 1496 - protein, 9 aa, Homo sapiens
RQIGSIDTD

SEQ ID NO: 1497 - protein, 9 aa, Homo sapiens
RCSLHSACC

SEQ ID NO: 1498 - protein, 9 aa, Homo sapiens
SIDTDPPAD

SEQ ID NO: 1499 - protein, 9 aa, Homo sapiens
SACCSGDPA

SEQ ID NO: 1500 - protein, 9 aa, Homo sapiens
CCFHGPAFS

SEQ ID NO: 1501 - protein, 9 aa, Homo sapiens
SYRLWGAPL

SEQ ID NO: 1502 - protein, 9 aa, Homo sapiens
LCCCFHGPA

SEQ ID NO: 1503 - protein, 9 aa, Homo sapiens
WEPVLVPEA

SEQ ID NO: 1504 - protein, 9 aa, Homo sapiens
PSNPLCCCF

SEQ ID NO: 1505 - protein, 9 aa, Homo sapiens
RTTTWARRT

SEQ ID NO: 1506 - protein, 9 aa, Homo sapiens
PAFSTLNPV

SEQ ID NO: 1507 - protein, 9 aa, Homo sapiens
ASLTMYVCA

SEQ ID NO: 1508 - protein, 9 aa, Homo sapiens
TSRAVTPTC

SEQ ID NO: 1509 - protein, 9 aa, Homo sapiens
TPAGPMPCS

SEQ ID NO: 1510 - protein, 9 aa, Homo sapiens
HPDPPMALS

SEQ ID NO: 1511 - protein, 9 aa, Homo sapiens
SRLPPSLRC

SEQ ID NO: 1512 - protein, 9 aa, Homo sapiens
PVLRHLFPQ

SEQ ID NO: 1513 - protein, 9 aa, Homo sapiens
PADGPSNPL

SEQ ID NO: 1514 - protein, 9 aa, Homo sapiens
EPVLVPEAH

SEQ ID NO: 1515 - protein, 9 aa, Homo sapiens
GPAFSTLNP

SEQ ID NO: 1516 - protein, 9 aa, Homo sapiens
PDPPMALSR

SEQ ID NO: 1517 - protein, 9 aa, Homo sapiens
PASYRLWGA

SEQ ID NO: 1518 - protein, 9 aa, Homo sapiens
WGAPLQPTL

SEQ ID NO: 1519 - protein, 9 aa, Homo sapiens
AGPMPCSRL

SEQ ID NO: 1520 - protein, 9 aa, Homo sapiens
LLPSLRCSL

SEQ ID NO: 1521 - protein, 9 aa, Homo sapiens
CSRLLPSLR

SEQ ID NO: 1522 - protein, 9 aa, Homo sapiens
RLLPSLRCS

SEQ ID NO: 1523 - protein, 9 aa, Homo sapiens
GPMPCSRLL

SEQ ID NO: 1524 - protein, 9 aa, Homo sapiens
PMPCSRLLP

SEQ ID NO: 1525 - protein, 9 aa, Homo sapiens
LPSLRCSLH

SEQ ID NO: 1526 - protein, 9 aa, Homo sapiens
MPCSRLLPS

SEQ ID NO: 1527 - protein, 9 aa, Homo sapiens
PCSRLLPSL

SEQ ID NO: 1528 - protein, 9 aa, Homo sapiens
SRLLPSLRC

SEQ ID NO: 1529 - protein, 9 aa, Homo sapiens
CSGDPASSR

SEQ ID NO: 1530 - protein, 9 aa, Homo sapiens
SSRLWGAPL

SEQ ID NO: 1531 - protein, 9 aa, Homo sapiens
SGDPASSRL

SEQ ID NO: 1532 - protein, 9 aa, Homo sapiens
PASSRLWGA

SEQ ID NO: 1533 - protein, 9 aa, Homo sapiens
CCSGDPASS

SEQ ID NO: 1534 - protein, 9 aa, Homo sapiens
DPASSRLWG

SEQ ID NO: 1535 - protein, 9 aa, Homo sapiens
GDPASSRLW

SEQ ID NO: 1536 - protein, 9 aa, Homo sapiens
SRLWGAPLQ

SEQ ID NO: 1537 - protein, 9 aa, Homo sapiens
ASSRLWGAP

SEQ ID NO: 1538 - protein, 8 aa, Homo sapiens
LLTDPAQW

SEQ ID NO: 1539 - protein, 9 aa, Homo sapiens
LLTDPAQWE

SEQ ID NO: 1540 - protein, 9 aa, Homo sapiens
SVPLLTDPA

SEQ ID NO: 1541 - protein, 9 aa, Homo sapiens
DPAQWEPVL

SEQ ID NO: 1542 - protein, 9 aa, Homo sapiens
LTDPAQWEP

SEQ ID NO: 1543 - protein, 9 aa, Homo sapiens
QASVPLLTD

SEQ ID NO: 1544 - protein, 9 aa, Homo sapiens
ASVPLLTDP

SEQ ID NO: 1545 - protein, 9 aa, Homo sapiens
VPLLTDPAQ

SEQ ID NO: 1546 - protein, 9 aa, Homo sapiens
TDPAQWEPV

SEQ ID NO: 1547 - protein, 9 aa, Homo sapiens
DLAQWEPVL

SEQ ID NO: 1548 - protein, 9 aa, Homo sapiens
PLLTDLAQW

SEQ ID NO: 1549 - protein, 9 aa, Homo sapiens
LLTDLAQWE

SEQ ID NO: 1550 - protein, 9 aa, Homo sapiens
SVPLLTDLA

SEQ ID NO: 1551 - protein, 9 aa, Homo sapiens
ASVPLLTDL

SEQ ID NO: 1552 - protein, 9 aa, Homo sapiens
LTDLAQWEP

SEQ ID NO: 1553 - protein, 9 aa, Homo sapiens
VPLLTDLAQ

SEQ ID NO: 1554 - protein, 9 aa, Homo sapiens
TDLAQWEPV

SEQ ID NO: 1555 - protein, 9 aa, Homo sapiens
HLAQWEPVL

SEQ ID NO: 1556 - protein, 9 aa, Homo sapiens
PLLTHLAQW

SEQ ID NO: 1557 - protein, 9 aa, Homo sapiens
LLTHLAQWE

SEQ ID NO: 1558 - protein, 9 aa, Homo sapiens
SVPLLTHLA

SEQ ID NO: 1559 - protein, 9 aa, Homo sapiens
ASVPLLTHL

SEQ ID NO: 1560 - protein, 9 aa, Homo sapiens
LTHLAQWEP

SEQ ID NO: 1561 - protein, 9 aa, Homo sapiens
LAQWEPVLV

SEQ ID NO: 1562 - protein, 9 aa, Homo sapiens
VPLLTHLAQ

SEQ ID NO: 1563 - protein, 9 aa, Homo sapiens
THLAQWEPV

SEQ ID NO: 1564 - protein, 8 aa, Homo sapiens
LTMYVCTP

SEQ ID NO: 1565 - protein, 9 aa, Homo sapiens
TMYVCTPVP

SEQ ID NO: 1566 - protein, 9 aa, Homo sapiens
LTMYVCTPV

SEQ ID NO: 1567 - protein, 9 aa, Homo sapiens
YVCTPVPHP

SEQ ID NO: 1568 - protein, 9 aa, Homo sapiens
CTPVPHPDP

SEQ ID NO: 1569 - protein, 9 aa, Homo sapiens
ASLTMYVCT

SEQ ID NO: 1570 - protein, 9 aa, Homo sapiens
VCTPVPHPD

SEQ ID NO: 1571 - protein, 9 aa, Homo sapiens
MYVCTPVPH

SEQ ID NO: 1572 - protein, 9 aa, Homo sapiens
TPTRQISSI

SEQ ID NO: 1573 - protein, 9 aa, Homo sapiens
RTPTRQISS

SEQ ID NO: 1574 - protein, 9 aa, Homo sapiens
QISSIDTDP

SEQ ID NO: 1575 - protein, 9 aa, Homo sapiens
SSIDTDPPA

SEQ ID NO: 1576 - protein, 9 aa, Homo sapiens
RQISSIDTD

SEQ ID NO: 1577 - protein, 9 aa, Homo sapiens
TRQISSIDT

SEQ ID NO: 1578 - protein, 9 aa, Homo sapiens
PTRQISSID

SEQ ID NO: 1579 - protein, 9 aa, Homo sapiens
ISSIDTDPP

SEQ ID NO: 1580 - protein, 9 aa, Homo sapiens
SRTPTRQIS

SEQ ID NO: 1581 - protein, 9 aa, Homo sapiens
QISSSDTDP

SEQ ID NO: 1582 - protein, 9 aa, Homo sapiens
SSSDTDPPA

SEQ ID NO: 1583 - protein, 9 aa, Homo sapiens
RQISSSDTD

SEQ ID NO: 1584 - protein, 9 aa, Homo sapiens
TPTRQISSS

SEQ ID NO: 1585 - protein, 9 aa, Homo sapiens
PTRQISSSD

SEQ ID NO: 1586 - protein, 9 aa, Homo sapiens
ISSSDTDPP

SEQ ID NO: 1587 - protein, 9 aa, Homo sapiens
TRQISSSDT

SEQ ID NO: 1588 - protein, 9 aa, Homo sapiens
GSSDTDPPA

SEQ ID NO: 1589 - protein, 9 aa, Homo sapiens
QIGSSDTDP

SEQ ID NO: 1590 - protein, 9 aa, Homo sapiens
RQIGSSDTD

SEQ ID NO: 1591 - protein, 9 aa, Homo sapiens
TPTRQIGSS

SEQ ID NO: 1592 - protein, 9 aa, Homo sapiens
PTRQIGSSD

SEQ ID NO: 1593 - protein, 9 aa, Homo sapiens
SSDTDPPAD

SEQ ID NO: 1594 - protein, 9 aa, Homo sapiens
TRQIGSSDT

SEQ ID NO: 1595 - protein, 9 aa, Homo sapiens
SDTDPPADG

SEQ ID NO: 1596 - protein, 9 aa, Homo sapiens
IGSSDTDPP

SEQ ID NO: 1597 - protein, 9 aa, Homo sapiens
SRGQALRRA

SEQ ID NO: 1598 - protein, 9 aa, Homo sapiens
RGQALRRAQ

SEQ ID NO: 1599 - protein, 10 aa, Homo sapiens
AVGLLTVISK

SEQ ID NO: 1600 - protein, 10 aa, Homo sapiens
QLGEQCWTAR

SEQ ID NO: 1601 - protein, 10 aa, Homo sapiens
GTALLCYSCK

SEQ ID NO: 1602 - protein, 10 aa, Homo sapiens
ALLPALGLLL

SEQ ID NO: 1603 - protein, 10 aa, Homo sapiens
GLALQPGTAL

SEQ ID NO: 1604 - protein, 10 aa, Homo sapiens
ILALLPALGL

SEQ ID NO: 1605 - protein, 10 aa, Homo sapiens
VLLALLMAGL

SEQ ID NO: 1606 - protein, 10 aa, Homo sapiens
GLLLWGPGQL

SEQ ID NO: 1607 - protein, 10 aa, Homo sapiens
GLLTVISKGC

SEQ ID NO: 1608 - protein, 10 aa, Homo sapiens
ALQPGTALLC

SEQ ID NO: 1609 - protein, 10 aa, Homo sapiens
LLPALGLLLW

SEQ ID NO: 1610 - protein, 10 aa, Homo sapiens
CLQVENCTQL

SEQ ID NO: 1611 - protein, 10 aa, Homo sapiens
ALQPAAAILA

SEQ ID NO: 1612 - protein, 10 aa, Homo sapiens
LQPGTALLCY

SEQ ID NO: 1613 - protein, 10 aa, Homo sapiens
LLCYSCKAQV

SEQ ID NO: 1614 - protein, 10 aa, Homo sapiens
DSQDYYVGKK

SEQ ID NO: 1615 - protein, 10 aa, Homo sapiens
DLCNASGAHA

SEQ ID NO: 1616 - protein, 10 aa, Homo sapiens
NCVDDSQDYY

SEQ ID NO: 1617 - protein, 10 aa, Homo sapiens
LLMAGLALQP

SEQ ID NO: 1618 - protein, 10 aa, Homo sapiens
RIRAVGLLTV

SEQ ID NO: 1619 - protein, 10 aa, Homo sapiens
LLALLMAGLA

SEQ ID NO: 1620 - protein, 10 aa, Homo sapiens
CVDDSQDYYV

SEQ ID NO: 1621 - protein, 10 aa, Homo sapiens
LQPAAAILAL

SEQ ID NO: 1622 - protein, 10 aa, Homo sapiens
LTVISKGCSL

SEQ ID NO: 1623 - protein, 10 aa, Homo sapiens
ALLMAGLALQ

SEQ ID NO: 1624 - protein, 10 aa, Homo sapiens
LMAGLALQPG

SEQ ID NO: 1625 - protein, 10 aa, Homo sapiens
TQLGEQCWTA

SEQ ID NO: 1626 - protein, 10 aa, Homo sapiens
VISKGCSLNC

SEQ ID NO: 1627 - protein, 10 aa, Homo sapiens
QVSNEDCLQV

SEQ ID NO: 1628 - protein, 10 aa, Homo sapiens
WTARIRAVGL

SEQ ID NO: 1629 - protein, 10 aa, Homo sapiens
YVGKKNITCC

SEQ ID NO: 1630 - protein, 10 aa, Homo sapiens
KAVLLALLMA

SEQ ID NO: 1631 - protein, 10 aa, Homo sapiens
NITCCDTDLC

SEQ ID NO: 1632 - protein, 10 aa, Homo sapiens
SLNCVDDSQD

SEQ ID NO: 1633 - protein, 10 aa, Homo sapiens
DDSQDYYVGK

SEQ ID NO: 1634 - protein, 10 aa, Homo sapiens
LALLMAGLAL

SEQ ID NO: 1635 - protein, 10 aa, Homo sapiens
KAQVSNEDCL

SEQ ID NO: 1636 - protein, 10 aa, Homo sapiens
ALLCYSCKAQ

SEQ ID NO: 1637 - protein, 10 aa, Homo sapiens
AAILALLPAL

SEQ ID NO: 1638 - protein, 10 aa, Homo sapiens
QPAAAILALL

SEQ ID NO: 1639 - protein, 10 aa, Homo sapiens
LLTVISKGCS

SEQ ID NO: 1640 - protein, 10 aa, Homo sapiens
LALQPGTALL

SEQ ID NO: 1641 - protein, 10 aa, Homo sapiens
TALLCYSCKA

SEQ ID NO: 1642 - protein, 10 aa, Homo sapiens
HALQPAAAIL

SEQ ID NO: 1643 - protein, 10 aa, Homo sapiens
AVLLALLMAG

SEQ ID NO: 1644 - protein, 10 aa, Homo sapiens
LNCVDDSQDY

SEQ ID NO: 1645 - protein, 10 aa, Homo sapiens
ALGLLLWGPG

SEQ ID NO: 1646 - protein, 10 aa, Homo sapiens
GAHALQPAAA

SEQ ID NO: 1647 - protein, 10 aa, Homo sapiens
AAAILALLPA

SEQ ID NO: 1648 - protein, 10 aa, Homo sapiens
LCNASGAHAL

SEQ ID NO: 1649 - protein, 10 aa, Homo sapiens
KNITCCDTDL

SEQ ID NO: 1650 - protein, 10 aa, Homo sapiens
TARIRAVGLL

SEQ ID NO: 1651 - protein, 10 aa, Homo sapiens
CTQLGEQCWT

SEQ ID NO: 1652 - protein, 10 aa, Homo sapiens
LALLPALGLL

SEQ ID NO: 1653 - protein, 10 aa, Homo sapiens
QVENCTQLGE

SEQ ID NO: 1654 - protein, 10 aa, Homo sapiens
GCSLNCVDDS

SEQ ID NO: 1655 - protein, 10 aa, Homo sapiens
GEQCWTARIR

SEQ ID NO: 1656 - protein, 10 aa, Homo sapiens
EQCWTARIRA

SEQ ID NO: 1657 - protein, 10 aa, Homo sapiens
DTDLCNASGA

SEQ ID NO: 1658 - protein, 10 aa, Homo sapiens
AILALLPALG

SEQ ID NO: 1659 - protein, 10 aa, Homo sapiens
TVISKGCSLN

SEQ ID NO: 1660 - protein, 10 aa, Homo sapiens
TCCDTDLCNA

SEQ ID NO: 1661 - protein, 10 aa, Homo sapiens
ISKGCSLNCV

SEQ ID NO: 1662 - protein, 10 aa, Homo sapiens
ITCCDTDLCN

SEQ ID NO: 1663 - protein, 10 aa, Homo sapiens
LCYSCKAQVS

SEQ ID NO: 1664 - protein, 10 aa, Homo sapiens
NCTQLGEQCW

SEQ ID NO: 1665 - protein, 10 aa, Homo sapiens
LGEQCWTARI

SEQ ID NO: 1666 - protein, 10 aa, Homo sapiens
NEDCLQVENC

SEQ ID NO: 1667 - protein, 10 aa, Homo sapiens
QDYYVGKKNI

SEQ ID NO: 1668 - protein, 10 aa, Homo sapiens
QCWTARIRAV

SEQ ID NO: 1669 - protein, 10 aa, Homo sapiens
ASGAHALQPA

SEQ ID NO: 1670 - protein, 10 aa, Homo sapiens
LQVENCTQLG

SEQ ID NO: 1671 - protein, 10 aa, Homo sapiens
MAGLALQPGT

SEQ ID NO: 1672 - protein, 10 aa, Homo sapiens
AHALQPAAAI

SEQ ID NO: 1673 - protein, 10 aa, Homo sapiens
IRAVGLLTVI

SEQ ID NO: 1674 - protein, 10 aa, Homo sapiens
YYVGKKNITC

SEQ ID NO: 1675 - protein, 10 aa, Homo sapiens
AQVSNEDCLQ

SEQ ID NO: 1676 - protein, 10 aa, Homo sapiens
RAVGLLTVIS

SEQ ID NO: 1677 - protein, 10 aa, Homo sapiens
NASGAHALQP

SEQ ID NO: 1678 - protein, 10 aa, Homo sapiens
LPALGLLLWG

SEQ ID NO: 1679 - protein, 10 aa, Homo sapiens
QPGTALLCYS

SEQ ID NO: 1680 - protein, 10 aa, Homo sapiens
ARIRAVGLLT

SEQ ID NO: 1681 - protein, 10 aa, Homo sapiens
SQDYYVGKKN

SEQ ID NO: 1682 - protein, 10 aa, Homo sapiens
MKAVLLALLM

SEQ ID NO: 1683 - protein, 10 aa, Homo sapiens
CCDTDLCNAS

SEQ ID NO: 1684 - protein, 10 aa, Homo sapiens
GKKNITCCDT

SEQ ID NO: 1685 - protein, 10 aa, Homo sapiens
SCKAQVSNED

SEQ ID NO: 1686 - protein, 10 aa, Homo sapiens
YSCKAQVSNE

SEQ ID NO: 1687 - protein, 10 aa, Homo sapiens
VSNEDCLQVE

SEQ ID NO: 1688 - protein, 10 aa, Homo sapiens
CSLNCVDDSQ

SEQ ID NO: 1689 - protein, 10 aa, Homo sapiens
PALGLLLWGP

SEQ ID NO: 1690 - protein, 10 aa, Homo sapiens
CKAQVSNEDC

SEQ ID NO: 1691 - protein, 10 aa, Homo sapiens
SGAHALQPAA

SEQ ID NO: 1692 - protein, 10 aa, Homo sapiens
DYYVGKKNIT

SEQ ID NO: 1693 - protein, 10 aa, Homo sapiens
ENCTQLGEQC

SEQ ID NO: 1694 - protein, 10 aa, Homo sapiens
LGLLLWGPGQ

SEQ ID NO: 1695 - protein, 10 aa, Homo sapiens
TDLCNASGAH

SEQ ID NO: 1696 - protein, 10 aa, Homo sapiens
AGLALQPGTA

SEQ ID NO: 1697 - protein, 10 aa, Homo sapiens
DCLQVENCTQ

SEQ ID NO: 1698 - protein, 10 aa, Homo sapiens
VGLLTVISKG

SEQ ID NO: 1699 - protein, 10 aa, Homo sapiens
HLFPQEAFPA

SEQ ID NO: 1700 - protein, 10 aa, Homo sapiens
TLNPVLRHLF

SEQ ID NO: 1701 - protein, 10 aa, Homo sapiens
RLWGAPLQPT

SEQ ID NO: 1702 - protein, 10 aa, Homo sapiens
TMYVCAPVPH

SEQ ID NO: 1703 - protein, 10 aa, Homo sapiens
RLPPSLRCSL

SEQ ID NO: 1704 - protein, 10 aa, Homo sapiens
MTHRTTTWAR

SEQ ID NO: 1705 - protein, 10 aa, Homo sapiens
VLRHLFPQEA

SEQ ID NO: 1706 - protein, 10 aa, Homo sapiens
VLVPEAHPNA

SEQ ID NO: 1707 - protein, 10 aa, Homo sapiens
GVVPQASVPL

SEQ ID NO: 1708 - protein, 10 aa, Homo sapiens
PMALSRTPTR

SEQ ID NO: 1709 - protein, 10 aa, Homo sapiens
SLTMYVCAPV

SEQ ID NO: 1710 - protein, 10 aa, Homo sapiens
TLGVVPQASV

SEQ ID NO: 1711 - protein, 10 aa, Homo sapiens
TTTWARRTSR

SEQ ID NO: 1712 - protein, 10 aa, Homo sapiens
SLRCSLHSAC

SEQ ID NO: 1713 - protein, 10 aa, Homo sapiens
VVPQASVPLL

SEQ ID NO: 1714 - protein, 10 aa, Homo sapiens
HPDPPMALSR

SEQ ID NO: 1715 - protein, 10 aa, Homo sapiens
CCSGDPASYR

SEQ ID NO: 1716 - protein, 10 aa, Homo sapiens
ALSRTPTRQI

SEQ ID NO: 1717 - protein, 10 aa, Homo sapiens
APSRGQALRR

SEQ ID NO: 1718 - protein, 10 aa, Homo sapiens
LLTHPAQWEP

SEQ ID NO: 1719 - protein, 10 aa, Homo sapiens
TPAGPMPCSR

SEQ ID NO: 1720 - protein, 10 aa, Homo sapiens
GPSNPLCCCF

SEQ ID NO: 1721 - protein, 10 aa, Homo sapiens
TTWARRTSRA

SEQ ID NO: 1722 - protein, 10 aa, Homo sapiens
WSVVSPAPSR

SEQ ID NO: 1723 - protein, 10 aa, Homo sapiens
ASYRLWGAPL

SEQ ID NO: 1724 - protein, 10 aa, Homo sapiens
SQVWSVVSPA

SEQ ID NO: 1725 - protein, 10 aa, Homo sapiens
ACCSGDPASY

SEQ ID NO: 1726 - protein, 10 aa, Homo sapiens
DLSQVWSVVS

SEQ ID NO: 1727 - protein, 10 aa, Homo sapiens
AVTPTCATPA

SEQ ID NO: 1728 - protein, 10 aa, Homo sapiens
VPHPDPPMAL

SEQ ID NO: 1729 - protein, 10 aa, Homo sapiens
CCFHGPAFST

SEQ ID NO: 1730 - protein, 10 aa, Homo sapiens
LCCCFHGPAF

SEQ ID NO: 1731 - protein, 10 aa, Homo sapiens
SLHSACCSGD

SEQ ID NO: 1732 - protein, 10 aa, Homo sapiens
GAPLQPTLGV

SEQ ID NO: 1733 - protein, 10 aa, Homo sapiens
PLCCCFHGPA

SEQ ID NO: 1734 - protein, 10 aa, Homo sapiens
RTSRAVTPTC

SEQ ID NO: 1735 - protein, 10 aa, Homo sapiens
QVWSVVSPAP

SEQ ID NO: 1736 - protein, 10 aa, Homo sapiens
LTHPAQWEPV

SEQ ID NO: 1737 - protein, 10 aa, Homo sapiens
RTPTRQIGSI

SEQ ID NO: 1738 - protein, 10 aa, Homo sapiens
QEAFPAHPIY

SEQ ID NO: 1739 - protein, 10 aa, Homo sapiens
AQWEPVLVPE

SEQ ID NO: 1740 - protein, 10 aa, Homo sapiens
STLNPVLRHL

SEQ ID NO: 1741 - protein, 10 aa, Homo sapiens
FSTLNPVLRH

SEQ ID NO: 1742 - protein, 10 aa, Homo sapiens
SPAPSRGQAL

SEQ ID NO: 1743 - protein, 10 aa, Homo sapiens
VPEAHPNASL

SEQ ID NO: 1744 - protein, 10 aa, Homo sapiens
QPTLGVVPQA

SEQ ID NO: 1745 - protein, 10 aa, Homo sapiens
GPAFSTLNPV

SEQ ID NO: 1746 - protein, 10 aa, Homo sapiens
CSGDPASYRL

SEQ ID NO: 1747 - protein, 10 aa, Homo sapiens
APVPHPDPPM

SEQ ID NO: 1748 - protein, 10 aa, Homo sapiens
AHPNASLTMY

SEQ ID NO: 1749 - protein, 10 aa, Homo sapiens
PCSRLPPSLR

SEQ ID NO: 1750 - protein, 10 aa, Homo sapiens
CATPAGPMPC

SEQ ID NO: 1751 - protein, 10 aa, Homo sapiens
MPCSRLPPSL

SEQ ID NO: 1752 - protein, 10 aa, Homo sapiens
LVPEAHPNAS

SEQ ID NO: 1753 - protein, 10 aa, Homo sapiens
PMPCSRLPPS

SEQ ID NO: 1754 - protein, 10 aa, Homo sapiens
PLLTHPAQWE

SEQ ID NO: 1755 - protein, 10 aa, Homo sapiens
ATPAGPMPCS

SEQ ID NO: 1756 - protein, 10 aa, Homo sapiens
AFPAHPIYDL

SEQ ID NO: 1757 - protein, 10 aa, Homo sapiens
THRTTTWARR

SEQ ID NO: 1758 - protein, 10 aa, Homo sapiens
AFSTLNPVLR

SEQ ID NO: 1759 - protein, 10 aa, Homo sapiens
HPNASLTMYV

SEQ ID NO: 1760 - protein, 10 aa, Homo sapiens
PAPSRGQALR

SEQ ID NO: 1761 - protein, 10 aa, Homo sapiens
LRHLFPQEAF

SEQ ID NO: 1762 - protein, 10 aa, Homo sapiens
PAFSTLNPVL

SEQ ID NO: 1763 - protein, 10 aa, Homo sapiens
VPQASVPLLT

SEQ ID NO: 1764 - protein, 10 aa, Homo sapiens
SVVSPAPSRG

SEQ ID NO: 1765 - protein, 10 aa, Homo sapiens
HPIYDLSQVW

SEQ ID NO: 1766 - protein, 10 aa, Homo sapiens
VPLLTHPAQW

SEQ ID NO: 1767 - protein, 10 aa, Homo sapiens
CSRLPPSLRC

SEQ ID NO: 1768 - protein, 10 aa, Homo sapiens
YVCAPVPHPD

SEQ ID NO: 1769 - protein, 10 aa, Homo sapiens
SIDTDPPADG

SEQ ID NO: 1770 - protein, 10 aa, Homo sapiens
PLQPTLGVVP

SEQ ID NO: 1771 - protein, 10 aa, Homo sapiens
PQEAFPAHPI

SEQ ID NO: 1772 - protein, 10 aa, Homo sapiens
GPMPCSRLPP

SEQ ID NO: 1773 - protein, 10 aa, Homo sapiens
CFHGPAFSTL

SEQ ID NO: 1774 - protein, 10 aa, Homo sapiens
PQASVPLLTH

SEQ ID NO: 1775 - protein, 10 aa, Homo sapiens
DPASYRLWGA

SEQ ID NO: 1776 - protein, 10 aa, Homo sapiens
ASVPLLTHPA

SEQ ID NO: 1777 - protein, 10 aa, Homo sapiens
RQIGSIDTDP

SEQ ID NO: 1778 - protein, 10 aa, Homo sapiens
NASLTMYVCA

SEQ ID NO: 1779 - protein, 10 aa, Homo sapiens
PVPHPDPPMA

SEQ ID NO: 1780 - protein, 10 aa, Homo sapiens
LPPSLRCSLH

SEQ ID NO: 1781 - protein, 10 aa, Homo sapiens
SVPLLTHPAQ

SEQ ID NO: 1782 - protein, 10 aa, Homo sapiens
HPAQWEPVLV

SEQ ID NO: 1783 - protein, 10 aa, Homo sapiens
QIGSIDTDPP

SEQ ID NO: 1784 - protein, 10 aa, Homo sapiens
PIYDLSQVWS

SEQ ID NO: 1785 - protein, 10 aa, Homo sapiens
IYDLSQVWSV

SEQ ID NO: 1786 - protein, 10 aa, Homo sapiens
THPAQWEPVL

SEQ ID NO: 1787 - protein, 10 aa, Homo sapiens
LQPTLGVVPQ

SEQ ID NO: 1788 - protein, 10 aa, Homo sapiens
EAHPNASLTM

SEQ ID NO: 1789 - protein, 10 aa, Homo sapiens
LTMYVCAPVP

SEQ ID NO: 1790 - protein, 10 aa, Homo sapiens
ASLTMYVCAP

SEQ ID NO: 1791 - protein, 10 aa, Homo sapiens
NPVLRHLFPQ

SEQ ID NO: 1792 - protein, 10 aa, Homo sapiens
PAGPMPCSRL

SEQ ID NO: 1793 - protein, 10 aa, Homo sapiens
APLQPTLGVV

SEQ ID NO: 1794 - protein, 10 aa, Homo sapiens
VTPTCATPAG

SEQ ID NO: 1795 - protein, 10 aa, Homo sapiens
HSACCSGDPA

SEQ ID NO: 1796 - protein, 10 aa, Homo sapiens
PTRQIGSIDT

SEQ ID NO: 1797 - protein, 10 aa, Homo sapiens
TSRAVTPTCA

SEQ ID NO: 1798 - protein, 10 aa, Homo sapiens
WARRTSRAVT

SEQ ID NO: 1799 - protein, 10 aa, Homo sapiens
RLLPSLRCSL

SEQ ID NO: 1800 - protein, 10 aa, Homo sapiens
LLPSLRCSLH

SEQ ID NO: 1801 - protein, 10 aa, Homo sapiens
PMPCSRLLPS

SEQ ID NO: 1802 - protein, 10 aa, Homo sapiens
MPCSRLLPSL

SEQ ID NO: 1803 - protein, 10 aa, Homo sapiens
PCSRLLPSLR

SEQ ID NO: 1804 - protein, 10 aa, Homo sapiens
CSRLLPSLRC

SEQ ID NO: 1805 - protein, 10 aa, Homo sapiens
GPMPCSRLLP

SEQ ID NO: 1806 - protein, 10 aa, Homo sapiens
LPSLRCSLHS

SEQ ID NO: 1807 - protein, 10 aa, Homo sapiens
AGPMPCSRLL

SEQ ID NO: 1808 - protein, 10 aa, Homo sapiens
SRLLPSLRCS

SEQ ID NO: 1809 - protein, 10 aa, Homo sapiens
CCSGDPASSR

SEQ ID NO: 1810 - protein, 10 aa, Homo sapiens
ASSRLWGAPL

SEQ ID NO: 1811 - protein, 10 aa, Homo sapiens
CSGDPASSRL

SEQ ID NO: 1812 - protein, 10 aa, Homo sapiens
DPASSRLWGA

SEQ ID NO: 1813 - protein, 10 aa, Homo sapiens
ACCSGDPASS

SEQ ID NO: 1814 - protein, 10 aa, Homo sapiens
GDPASSRLWG

SEQ ID NO: 1815 - protein, 10 aa, Homo sapiens
SSRLWGAPLQ

SEQ ID NO: 1816 - protein, 10 aa, Homo sapiens
SRLWGAPLQP

SEQ ID NO: 1817 - protein, 10 aa, Homo sapiens
SGDPASSRLW

SEQ ID NO: 1818 - protein, 10 aa, Homo sapiens
PASSRLWGAP

SEQ ID NO: 1819 - protein, 10 aa, Homo sapiens
LTDLAQWEPV

SEQ ID NO: 1820 - protein, 10 aa, Homo sapiens
SVPLLTDLAQ

SEQ ID NO: 1821 - protein, 10 aa, Homo sapiens
VPLLTDLAQW

SEQ ID NO: 1822 - protein, 10 aa, Homo sapiens
QASVPLLTDL

SEQ ID NO: 1823 - protein, 10 aa, Homo sapiens
DLAQWEPVLV

SEQ ID NO: 1824 - protein, 10 aa, Homo sapiens
LLTDLAQWEP

SEQ ID NO: 1825 - protein, 10 aa, Homo sapiens
TDLAQWEPVL

SEQ ID NO: 1826 - protein, 10 aa, Homo sapiens
ASVPLLTDLA

SEQ ID NO: 1827 - protein, 10 aa, Homo sapiens
PLLTDLAQWE

SEQ ID NO: 1828 - protein, 10 aa, Homo sapiens
HLAQWEPVLV

SEQ ID NO: 1829 - protein, 10 aa, Homo sapiens
LLTHLAQWEP

SEQ ID NO: 1830 - protein, 10 aa, Homo sapiens
LTHLAQWEPV

SEQ ID NO: 1831 - protein, 10 aa, Homo sapiens
QASVPLLTHL

SEQ ID NO: 1832 - protein, 10 aa, Homo sapiens
VPLLTHLAQW

SEQ ID NO: 1833 - protein, 10 aa, Homo sapiens
SVPLLTHLAQ

SEQ ID NO: 1834 - protein, 10 aa, Homo sapiens
PLLTHLAQWE

SEQ ID NO: 1835 - protein, 10 aa, Homo sapiens
THLAQWEPVL

SEQ ID NO: 1836 - protein, 10 aa, Homo sapiens
ASVPLLTHLA

SEQ ID NO: 1837 - protein, 10 aa, Homo sapiens
LAQWEPVLVP

SEQ ID NO: 1838 - protein, 10 aa, Homo sapiens
TMYVCTPVPH

SEQ ID NO: 1839 - protein, 10 aa, Homo sapiens
SLTMYVCTPV

SEQ ID NO: 1840 - protein, 10 aa, Homo sapiens
TPVPHPDPPM

SEQ ID NO: 1841 - protein, 10 aa, Homo sapiens
YVCTPVPHPD

SEQ ID NO: 1842 - protein, 10 aa, Homo sapiens
LTMYVCTPVP

SEQ ID NO: 1843 - protein, 10 aa, Homo sapiens
ASLTMYVCTP

SEQ ID NO: 1844 - protein, 10 aa, Homo sapiens
CTPVPHPDPP

SEQ ID NO: 1845 - protein, 10 aa, Homo sapiens
NASLTMYVCT

SEQ ID NO: 1846 - protein, 10 aa, Homo sapiens
VCTPVPHPDP

SEQ ID NO: 1847 - protein, 10 aa, Homo sapiens
MYVCTPVPHP

SEQ ID NO: 1848 - protein, 10 aa, Homo sapiens
RTPTRQISSI

SEQ ID NO: 1849 - protein, 10 aa, Homo sapiens
QISSIDTDPP

SEQ ID NO: 1850 - protein, 10 aa, Homo sapiens
RQISSIDTDP

SEQ ID NO: 1851 - protein, 10 aa, Homo sapiens
ISSIDTDPPA

SEQ ID NO: 1852 - protein, 10 aa, Homo sapiens
PTRQISSIDT

SEQ ID NO: 1853 - protein, 10 aa, Homo sapiens
TPTRQISSID

SEQ ID NO: 1854 - protein, 10 aa, Homo sapiens
LSRTPTRQIS

SEQ ID NO: 1855 - protein, 10 aa, Homo sapiens
SSIDTDPPAD

SEQ ID NO: 1856 - protein, 10 aa, Homo sapiens
SRTPTRQISS

SEQ ID NO: 1857 - protein, 10 aa, Homo sapiens
TRQISSIDTD

SEQ ID NO: 1858 - protein, 10 aa, Homo sapiens
RTPTRQISSS

SEQ ID NO: 1859 - protein, 10 aa, Homo sapiens
QISSSDTDPP

SEQ ID NO: 1860 - protein, 10 aa, Homo sapiens
ISSSDTDPPA

SEQ ID NO: 1861 - protein, 10 aa, Homo sapiens
RQISSSDTDP

SEQ ID NO: 1862 - protein, 10 aa, Homo sapiens
PTRQISSSDT

SEQ ID NO: 1863 - protein, 10 aa, Homo sapiens
TPTRQISSSD

SEQ ID NO: 1864 - protein, 10 aa, Homo sapiens
SSSDTDPPAD

SEQ ID NO: 1865 - protein, 10 aa, Homo sapiens
TRQISSSDTD

SEQ ID NO: 1866 - protein, 10 aa, Homo sapiens
QIGSSDTDPP

SEQ ID NO: 1867 - protein, 10 aa, Homo sapiens
RQIGSSDTDP

SEQ ID NO: 1868 - protein, 10 aa, Homo sapiens
RTPTRQIGSS

SEQ ID NO: 1869 - protein, 10 aa, Homo sapiens
PTRQIGSSDT

SEQ ID NO: 1870 - protein, 10 aa, Homo sapiens
GSSDTDPPAD

SEQ ID NO: 1871 - protein, 10 aa, Homo sapiens
TPTRQIGSSD

SEQ ID NO: 1872 - protein, 10 aa, Homo sapiens
IGSSDTDPPA

SEQ ID NO: 1873 - protein, 10 aa, Homo sapiens
SSDTDPPADG

SEQ ID NO: 1874 - protein, 10 aa, Homo sapiens
SDTDPPADGP

SEQ ID NO: 1875 - protein, 10 aa, Homo sapiens
TRQIGSSDTD

SEQ ID NO: 1876 - protein, 10 aa, Homo sapiens
PSRGQALRRA

SEQ ID NO: 1877 - protein, 10 aa, Homo sapiens
SRGQALRRAQ

SEQ ID NO: 1878 - protein, 9 aa, Homo sapiens
SQDYYVGKK

SEQ ID NO: 1879 - protein, 9 aa, Homo sapiens
TALLCYSCK

SEQ ID NO: 1880 - protein, 9 aa, Homo sapiens
VGLLTVISK

SEQ ID NO: 1881 - protein, 9 aa, Homo sapiens
AVLLALLMA

SEQ ID NO: 1882 - protein, 9 aa, Homo sapiens
TVISKGCSL

SEQ ID NO: 1883 - protein, 9 aa, Homo sapiens
CVDDSQDYY

SEQ ID NO: 1884 - protein, 9 aa, Homo sapiens
KAVLLALLM

SEQ ID NO: 1885 - protein, 9 aa, Homo sapiens
GLALQPGTA

SEQ ID NO: 1886 - protein, 9 aa, Homo sapiens
ALLMAGLAL

SEQ ID NO: 1887 - protein, 9 aa, Homo sapiens
LQPAAAILA

SEQ ID NO: 1888 - protein, 9 aa, Homo sapiens
CTQLGEQCW

SEQ ID NO: 1889 - protein, 9 aa, Homo sapiens
LQVENCTQL

SEQ ID NO: 1890 - protein, 9 aa, Homo sapiens
AQVSNEDCL

SEQ ID NO: 1891 - protein, 9 aa, Homo sapiens
RAVGLLTVI

SEQ ID NO: 1892 - protein, 9 aa, Homo sapiens
QCWTARIRA

SEQ ID NO: 1893 - protein, 9 aa, Homo sapiens
QLGEQCWTA

SEQ ID NO: 1894 - protein, 9 aa, Homo sapiens
LLPALGLLL

SEQ ID NO: 1895 - protein, 9 aa, Homo sapiens
ALLPALGLL

SEQ ID NO: 1896 - protein, 9 aa, Homo sapiens
DSQDYYVGK

SEQ ID NO: 1897 - protein, 9 aa, Homo sapiens
LLLWGPGQL

SEQ ID NO: 1898 - protein, 9 aa, Homo sapiens
LALLPALGL

SEQ ID NO: 1899 - protein, 9 aa, Homo sapiens
AAILALLPA

SEQ ID NO: 1900 - protein, 9 aa, Homo sapiens
ALLCYSCKA

SEQ ID NO: 1901 - protein, 9 aa, Homo sapiens
GAHALQPAA

SEQ ID NO: 1902 - protein, 9 aa, Homo sapiens
GTALLCYSC

SEQ ID NO: 1903 - protein, 9 aa, Homo sapiens
AILALLPAL

SEQ ID NO: 1904 - protein, 9 aa, Homo sapiens
LLALLMAGL

SEQ ID NO: 1905 - protein, 9 aa, Homo sapiens
LGEQCWTAR

SEQ ID NO: 1906 - protein, 9 aa, Homo sapiens
NITCCDTDL

SEQ ID NO: 1907 - protein, 9 aa, Homo sapiens
LCYSCKAQV

SEQ ID NO: 1908 - protein, 9 aa, Homo sapiens
LPALGLLLW

SEQ ID NO: 1909 - protein, 9 aa, Homo sapiens
ALQPAAAIL

SEQ ID NO: 1910 - protein, 9 aa, Homo sapiens
QPAAAILAL

SEQ ID NO: 1911 - protein, 9 aa, Homo sapiens
YVGKKNITC

SEQ ID NO: 1912 - protein, 9 aa, Homo sapiens
ALQPGTALL

SEQ ID NO: 1913 - protein, 9 aa, Homo sapiens
QPGTALLCY

SEQ ID NO: 1914 - protein, 9 aa, Homo sapiens
EQCWTARIR

SEQ ID NO: 1915 - protein, 9 aa, Homo sapiens
LALQPGTAL

SEQ ID NO: 1916 - protein, 9 aa, Homo sapiens
LALLMAGLA

SEQ ID NO: 1917 - protein, 9 aa, Homo sapiens
NCVDDSQDY

SEQ ID NO: 1918 - protein, 9 aa, Homo sapiens
HALQPAAAI

SEQ ID NO: 1919 - protein, 9 aa, Homo sapiens
RIRAVGLLT

SEQ ID NO: 1920 - protein, 9 aa, Homo sapiens
QVSNEDCLQ

SEQ ID NO: 1921 - protein, 9 aa, Homo sapiens
LCNASGAHA

SEQ ID NO: 1922 - protein, 9 aa, Homo sapiens
TARIRAVGL

SEQ ID NO: 1923 - protein, 9 aa, Homo sapiens
AVGLLTVIS

SEQ ID NO: 1924 - protein, 9 aa, Homo sapiens
QVENCTQLG

SEQ ID NO: 1925 - protein, 9 aa, Homo sapiens
CCDTDLCNA

SEQ ID NO: 1926 - protein, 9 aa, Homo sapiens
GLLTVISKG

SEQ ID NO: 1927 - protein, 9 aa, Homo sapiens
GLLLWGPGQ

SEQ ID NO: 1928 - protein, 9 aa, Homo sapiens
GEQCWTARI

SEQ ID NO: 1929 - protein, 9 aa, Homo sapiens
LTVISKGCS

SEQ ID NO: 1930 - protein, 9 aa, Homo sapiens
VLLALLMAG

SEQ ID NO: 1931 - protein, 9 aa, Homo sapiens
LQPGTALLC

SEQ ID NO: 1932 - protein, 9 aa, Homo sapiens
DLCNASGAH

SEQ ID NO: 1933 - protein, 9 aa, Homo sapiens
DYYVGKKNI

SEQ ID NO: 1934 - protein, 9 aa, Homo sapiens
ITCCDTDLC

SEQ ID NO: 1935 - protein, 9 aa, Homo sapiens
WTARIRAVG

SEQ ID NO: 1936 - protein, 9 aa, Homo sapiens
TQLGEQCWT

SEQ ID NO: 1937 - protein, 9 aa, Homo sapiens
ALGLLLWGP

SEQ ID NO: 1938 - protein, 9 aa, Homo sapiens
LMAGLALQP

SEQ ID NO: 1939 - protein, 9 aa, Homo sapiens
LLMAGLALQ

SEQ ID NO: 1940 - protein, 9 aa, Homo sapiens
YYVGKKNIT

SEQ ID NO: 1941 - protein, 9 aa, Homo sapiens
GCSLNCVDD

SEQ ID NO: 1942 - protein, 9 aa, Homo sapiens
KAQVSNEDC

SEQ ID NO: 1943 - protein, 9 aa, Homo sapiens
VSNEDCLQV

SEQ ID NO: 1944 - protein, 9 aa, Homo sapiens
CLQVENCTQ

SEQ ID NO: 1945 - protein, 9 aa, Homo sapiens
VDDSQDYYV

SEQ ID NO: 1946 - protein, 9 aa, Homo sapiens
VISKGCSLN

SEQ ID NO: 1947 - protein, 9 aa, Homo sapiens
ILALLPALG

SEQ ID NO: 1948 - protein, 9 aa, Homo sapiens
TCCDTDLCN

SEQ ID NO: 1949 - protein, 9 aa, Homo sapiens
CNASGAHAL

SEQ ID NO: 1950 - protein, 9 aa, Homo sapiens
IRAVGLLTV

SEQ ID NO: 1951 - protein, 9 aa, Homo sapiens
CYSCKAQVS

SEQ ID NO: 1952 - protein, 9 aa, Homo sapiens
SLNCVDDSQ

SEQ ID NO: 1953 - protein, 9 aa, Homo sapiens
AAAILALLP

SEQ ID NO: 1954 - protein, 9 aa, Homo sapiens
TDLCNASGA

SEQ ID NO: 1955 - protein, 9 aa, Homo sapiens
DTDLCNASG

SEQ ID NO: 1956 - protein, 9 aa, Homo sapiens
ARIRAVGLL

SEQ ID NO: 1957 - protein, 9 aa, Homo sapiens
LLTVISKGC

SEQ ID NO: 1958 - protein, 9 aa, Homo sapiens
NCTQLGEQC

SEQ ID NO: 1959 - protein, 9 aa, Homo sapiens
SKGCSLNCV

SEQ ID NO: 1960 - protein, 9 aa, Homo sapiens
NASGAHALQ

SEQ ID NO: 1961 - protein, 9 aa, Homo sapiens
MAGLALQPG

SEQ ID NO: 1962 - protein, 9 aa, Homo sapiens
LLCYSCKAQ

SEQ ID NO: 1963 - protein, 9 aa, Homo sapiens
SCKAQVSNE

SEQ ID NO: 1964 - protein, 9 aa, Homo sapiens
SGAHALQPA

SEQ ID NO: 1965 - protein, 9 aa, Homo sapiens
MKAVLLALL

SEQ ID NO: 1966 - protein, 9 aa, Homo sapiens
AHALQPAAA

SEQ ID NO: 1967 - protein, 9 aa, Homo sapiens
PAAAILALL

SEQ ID NO: 1968 - protein, 9 aa, Homo sapiens
KNITCCDTD

SEQ ID NO: 1969 - protein, 9 aa, Homo sapiens
VENCTQLGE

SEQ ID NO: 1970 - protein, 9 aa, Homo sapiens
DCLQVENCT

SEQ ID NO: 1971 - protein, 9 aa, Homo sapiens
GKKNITCCD

SEQ ID NO: 1972 - protein, 9 aa, Homo sapiens
KGCSLNCVD

SEQ ID NO: 1973 - protein, 9 aa, Homo sapiens
PALGLLLWG

SEQ ID NO: 1974 - protein, 9 aa, Homo sapiens
KKNITCCDT

SEQ ID NO: 1975 - protein, 9 aa, Homo sapiens
NEDCLQVEN

SEQ ID NO: 1976 - protein, 9 aa, Homo sapiens
LNCVDDSQD

SEQ ID NO: 1977 - protein, 9 aa, Homo sapiens
ASGAHALQP

SEQ ID NO: 1978 - protein, 9 aa, Homo sapiens
SVVSPAPSR

SEQ ID NO: 1979 - protein, 9 aa, Homo sapiens
TTWARRTSR

SEQ ID NO: 1980 - protein, 9 aa, Homo sapiens
MALSRTPTR

SEQ ID NO: 1981 - protein, 9 aa, Homo sapiens
APSRGQALR

SEQ ID NO: 1982 - protein, 9 aa, Homo sapiens
QVWSVVSPA

SEQ ID NO: 1983 - protein, 9 aa, Homo sapiens
STLNPVLRH

SEQ ID NO: 1984 - protein, 9 aa, Homo sapiens
LVPEAHPNA

SEQ ID NO: 1985 - protein, 9 aa, Homo sapiens
LTMYVCAPV

SEQ ID NO: 1986 - protein, 9 aa, Homo sapiens
VVPQASVPL

SEQ ID NO: 1987 - protein, 9 aa, Homo sapiens
SVPLLTHPA

SEQ ID NO: 1988 - protein, 9 aa, Homo sapiens
VTPTCATPA

SEQ ID NO: 1989 - protein, 9 aa, Homo sapiens
MTHRTTTWA

SEQ ID NO: 1990 - protein, 9 aa, Homo sapiens
GVVPQASVP

SEQ ID NO: 1991 - protein, 9 aa, Homo sapiens
THRTTTWAR

SEQ ID NO: 1992 - protein, 9 aa, Homo sapiens
LFPQEAFPA

SEQ ID NO: 1993 - protein, 9 aa, Homo sapiens
RTPTRQIGS

SEQ ID NO: 1994 - protein, 9 aa, Homo sapiens
APLQPTLGV

SEQ ID NO: 1995 - protein, 9 aa, Homo sapiens
MYVCAPVPH

SEQ ID NO: 1996 - protein, 9 aa, Homo sapiens
RLWGAPLQP

SEQ ID NO: 1997 - protein, 9 aa, Homo sapiens
HRTTTWARR

SEQ ID NO: 1998 - protein, 9 aa, Homo sapiens
QASVPLLTH

SEQ ID NO: 1999 - protein, 9 aa, Homo sapiens
FPAHPIYDL

SEQ ID NO: 2000 - protein, 9 aa, Homo sapiens
SYRLWGAPL

SEQ ID NO: 2001 - protein, 9 aa, Homo sapiens
CSRLPPSLR

SEQ ID NO: 2002 - protein, 9 aa, Homo sapiens
PAGPMPCSR

SEQ ID NO: 2003 - protein, 9 aa, Homo sapiens
CSGDPASYR

SEQ ID NO: 2004 - protein, 9 aa, Homo sapiens
FSTLNPVLR

SEQ ID NO: 2005 - protein, 9 aa, Homo sapiens
SLRCSLHSA

SEQ ID NO: 2006 - protein, 9 aa, Homo sapiens
RTSRAVTPT

SEQ ID NO: 2007 - protein, 9 aa, Homo sapiens
HPIYDLSQV

SEQ ID NO: 2008 - protein, 9 aa, Homo sapiens
RQIGSIDTD

SEQ ID NO: 2009 - protein, 9 aa, Homo sapiens
AQWEPVLVP

SEQ ID NO: 2010 - protein, 9 aa, Homo sapiens
TPTRQIGSI

SEQ ID NO: 2011 - protein, 9 aa, Homo sapiens
AVTPTCATP

SEQ ID NO: 2012 - protein, 9 aa, Homo sapiens
TCATPAGPM

SEQ ID NO: 2013 - protein, 9 aa, Homo sapiens
LPPSLRCSL

SEQ ID NO: 2014 - protein, 9 aa, Homo sapiens
YVCAPVPHP

SEQ ID NO: 2015 - protein, 9 aa, Homo sapiens
VPQASVPLL

SEQ ID NO: 2016 - protein, 9 aa, Homo sapiens
SACCSGDPA

SEQ ID NO: 2017 - protein, 9 aa, Homo sapiens
LTHPAQWEP

SEQ ID NO: 2018 - protein, 9 aa, Homo sapiens
AFSTLNPVL

SEQ ID NO: 2019 - protein, 9 aa, Homo sapiens
VPHPDPPMA

SEQ ID NO: 2020 - protein, 9 aa, Homo sapiens
HPNASLTMY

SEQ ID NO: 2021 - protein, 9 aa, Homo sapiens
SPAPSRGQA

SEQ ID NO: 2022 - protein, 9 aa, Homo sapiens
PVPHPDPPM

SEQ ID NO: 2023 - protein, 9 aa, Homo sapiens
HPAQWEPVL

SEQ ID NO: 2024 - protein, 9 aa, Homo sapiens
LCCCFHGPA

SEQ ID NO: 2025 - protein, 9 aa, Homo sapiens
CCSGDPASY

SEQ ID NO: 2026 - protein, 9 aa, Homo sapiens
ATPAGPMPC

SEQ ID NO: 2027 - protein, 9 aa, Homo sapiens
CCCFHGPAF

SEQ ID NO: 2028 - protein, 9 aa, Homo sapiens
FPQEAFPAH

SEQ ID NO: 2029 - protein, 9 aa, Homo sapiens
VVSPAPSRG

SEQ ID NO: 2030 - protein, 9 aa, Homo sapiens
PTLGVVPQA

SEQ ID NO: 2031 - protein, 9 aa, Homo sapiens
RGQALRRAR

SEQ ID NO: 2032 - protein, 9 aa, Homo sapiens
GPAFSTLNP

SEQ ID NO: 2033 - protein, 9 aa, Homo sapiens
EAFPAHPIY

SEQ ID NO: 2034 - protein, 9 aa, Homo sapiens
DLSQVWSVV

SEQ ID NO: 2035 - protein, 9 aa, Homo sapiens
GSIDTDPPA

SEQ ID NO: 2036 - protein, 9 aa, Homo sapiens
RHLFPQEAF

SEQ ID NO: 2037 - protein, 9 aa, Homo sapiens
NPLCCCFHG

SEQ ID NO: 2038 - protein, 9 aa, Homo sapiens
SQVWSVVSP

SEQ ID NO: 2039 - protein, 9 aa, Homo sapiens
RAVTPTCAT

SEQ ID NO: 2040 - protein, 9 aa, Homo sapiens
PVLRHLFPQ

SEQ ID NO: 2041 - protein, 9 aa, Homo sapiens
EPVLVPEAH

SEQ ID NO: 2042 - protein, 9 aa, Homo sapiens
PDPPMALSR

SEQ ID NO: 2043 - protein, 9 aa, Homo sapiens
PSRGQALRR

SEQ ID NO: 2044 - protein, 9 aa, Homo sapiens
PIYDLSQVW

SEQ ID NO: 2045 - protein, 9 aa, Homo sapiens
TMYVCAPVP

SEQ ID NO: 2046 - protein, 9 aa, Homo sapiens
HLFPQEAFP

SEQ ID NO: 2047 - protein, 9 aa, Homo sapiens
GAPLQPTLG

SEQ ID NO: 2048 - protein, 9 aa, Homo sapiens
VLVPEAHPN

SEQ ID NO: 2049 - protein, 9 aa, Homo sapiens
LQPTLGVVP

SEQ ID NO: 2050 - protein, 9 aa, Homo sapiens
YDLSQVWSV

SEQ ID NO: 2051 - protein, 9 aa, Homo sapiens
PLLTHPAQW

SEQ ID NO: 2052 - protein, 9 aa, Homo sapiens
GPSNPLCCC

SEQ ID NO: 2053 - protein, 9 aa, Homo sapiens
RCSLHSACC

SEQ ID NO: 2054 - protein, 9 aa, Homo sapiens
NPVLRHLFP

SEQ ID NO: 2055 - protein, 9 aa, Homo sapiens
CFHGPAFST

SEQ ID NO: 2056 - protein, 9 aa, Homo sapiens
WEPVLVPEA

SEQ ID NO: 2057 - protein, 9 aa, Homo sapiens
QEAFPAHPI

SEQ ID NO: 2058 - protein, 9 aa, Homo sapiens
NASLTMYVC

SEQ ID NO: 2059 - protein, 9 aa, Homo sapiens
SIDTDPPAD

SEQ ID NO: 2060 - protein, 9 aa, Homo sapiens
VLRHLFPQE

SEQ ID NO: 2061 - protein, 9 aa, Homo sapiens
LNPVLRHLF

SEQ ID NO: 2062 - protein, 9 aa, Homo sapiens
CCFHGPAFS

SEQ ID NO: 2063 - protein, 9 aa, Homo sapiens
SLHSACCSG

SEQ ID NO: 2064 - protein, 9 aa, Homo sapiens
QIGSIDTDP

SEQ ID NO: 2065 - protein, 9 aa, Homo sapiens
SGDPASYRL

SEQ ID NO: 2066 - protein, 9 aa, Homo sapiens
SNPLCCCFH

SEQ ID NO: 2067 - protein, 9 aa, Homo sapiens
ALSRTPTRQ

SEQ ID NO: 2068 - protein, 9 aa, Homo sapiens
SLTMYVCAP

SEQ ID NO: 2069 - protein, 9 aa, Homo sapiens
AFPAHPIYD

SEQ ID NO: 2070 - protein, 9 aa, Homo sapiens
PLQPTLGVV

SEQ ID NO: 2071 - protein, 9 aa, Homo sapiens
TLGVVPQAS

SEQ ID NO: 2072 - protein, 9 aa, Homo sapiens
TLNPVLRHL

SEQ ID NO: 2073 - protein, 9 aa, Homo sapiens
LLTHPAQWE

SEQ ID NO: 2074 - protein, 9 aa, Homo sapiens
AHPNASLTM

SEQ ID NO: 2075 - protein, 9 aa, Homo sapiens
IYDLSQVWS

SEQ ID NO: 2076 - protein, 9 aa, Homo sapiens
PASYRLWGA

SEQ ID NO: 2077 - protein, 9 aa, Homo sapiens
PAFSTLNPV

SEQ ID NO: 2078 - protein, 9 aa, Homo sapiens
CSRLLPSLR

SEQ ID NO: 2079 - protein, 9 aa, Homo sapiens
LLPSLRCSL

SEQ ID NO: 2080 - protein, 9 aa, Homo sapiens
LPSLRCSLH

SEQ ID NO: 2081 - protein, 9 aa, Homo sapiens
GPMPCSRLL

SEQ ID NO: 2082 - protein, 9 aa, Homo sapiens
MPCSRLLPS

SEQ ID NO: 2083 - protein, 9 aa, Homo sapiens
PCSRLLPSL

SEQ ID NO: 2084 - protein, 9 aa, Homo sapiens
RLLPSLRCS

SEQ ID NO: 2085 - protein, 9 aa, Homo sapiens
PMPCSRLLP

SEQ ID NO: 2086 - protein, 9 aa, Homo sapiens
SRLLPSLRC

SEQ ID NO: 2087 - protein, 9 aa, Homo sapiens
CSGDPASSR

SEQ ID NO: 2088 - protein, 9 aa, Homo sapiens
PASSRLWGA

SEQ ID NO: 2089 - protein, 9 aa, Homo sapiens
SSRLWGAPL

SEQ ID NO: 2090 - protein, 9 aa, Homo sapiens
CCSGDPASS

SEQ ID NO: 2091 - protein, 9 aa, Homo sapiens
SGDPASSRL

SEQ ID NO: 2092 - protein, 9 aa, Homo sapiens
DPASSRLWG

SEQ ID NO: 2093 - protein, 9 aa, Homo sapiens
GDPASSRLW

SEQ ID NO: 2094 - protein, 9 aa, Homo sapiens
SRLWGAPLQ

SEQ ID NO: 2095 - protein, 8 aa, Homo sapiens
SSRLWGAP

SEQ ID NO: 2096 - protein, 9 aa, Homo sapiens
SVPLLTDPA

SEQ ID NO: 2097 - protein, 9 aa, Homo sapiens
LTDPAQWEP

SEQ ID NO: 2098 - protein, 9 aa, Homo sapiens
PLLTDPAQW

SEQ ID NO: 2099 - protein, 9 aa, Homo sapiens
DPAQWEPVL

SEQ ID NO: 2100 - protein, 9 aa, Homo sapiens
LLTDPAQWE

SEQ ID NO: 2101 - protein, 9 aa, Homo sapiens
QASVPLLTD

SEQ ID NO: 2102 - protein, 9 aa, Homo sapiens
VPLLTDPAQ

SEQ ID NO: 2103 - protein, 9 aa, Homo sapiens
TDPAQWEPV

SEQ ID NO: 2104 - protein, 9 aa, Homo sapiens
ASVPLLTDP

SEQ ID NO: 2105 - protein, 9 aa, Homo sapiens
SVPLLTDLA

SEQ ID NO: 2106 - protein, 9 aa, Homo sapiens
LTDLAQWEP

SEQ ID NO: 2107 - protein, 9 aa, Homo sapiens
DLAQWEPVL

SEQ ID NO: 2108 - protein, 9 aa, Homo sapiens
VPLLTDLAQ

SEQ ID NO: 2109 - protein, 9 aa, Homo sapiens
PLLTDLAQW

SEQ ID NO: 2110 - protein, 9 aa, Homo sapiens
LLTDLAQWE

SEQ ID NO: 2111 - protein, 9 aa, Homo sapiens
TDLAQWEPV

SEQ ID NO: 2112 - protein, 9 aa, Homo sapiens
ASVPLLTDL

SEQ ID NO: 2113 - protein, 9 aa, Homo sapiens
SVPLLTHLA

SEQ ID NO: 2114 - protein, 9 aa, Homo sapiens
HLAQWEPVL

SEQ ID NO: 2115 - protein, 9 aa, Homo sapiens
LAQWEPVLV

SEQ ID NO: 2116 - protein, 9 aa, Homo sapiens
LTHLAQWEP

SEQ ID NO: 2117 - protein, 9 aa, Homo sapiens
VPLLTHLAQ

SEQ ID NO: 2118 - protein, 9 aa, Homo sapiens
PLLTHLAQW

SEQ ID NO: 2119 - protein, 9 aa, Homo sapiens
LLTHLAQWE

SEQ ID NO: 2120 - protein, 9 aa, Homo sapiens
THLAQWEPV

SEQ ID NO: 2121 - protein, 9 aa, Homo sapiens
ASVPLLTHL

SEQ ID NO: 2122 - protein, 9 aa, Homo sapiens
LTMYVCTPV

SEQ ID NO: 2123 - protein, 9 aa, Homo sapiens
MYVCTPVPH

SEQ ID NO: 2124 - protein, 9 aa, Homo sapiens
YVCTPVPHP

SEQ ID NO: 2125 - protein, 9 aa, Homo sapiens
CTPVPHPDP

SEQ ID NO: 2126 - protein, 9 aa, Homo sapiens
TMYVCTPVP

SEQ ID NO: 2127 - protein, 9 aa, Homo sapiens
SLTMYVCTP

SEQ ID NO: 2128 - protein, 9 aa, Homo sapiens
VCTPVPHPD

SEQ ID NO: 2129 - protein, 8 aa, Homo sapiens
ASLTMYVC

SEQ ID NO: 2130 - protein, 9 aa, Homo sapiens
RTPTRQISS

SEQ ID NO: 2131 - protein, 9 aa, Homo sapiens
RQISSIDTD

SEQ ID NO: 2132 - protein, 9 aa, Homo sapiens
TPTRQISSI

SEQ ID NO: 2133 - protein, 9 aa, Homo sapiens
QISSIDTDP

SEQ ID NO: 2134 - protein, 9 aa, Homo sapiens
SSIDTDPPA

SEQ ID NO: 2135 - protein, 9 aa, Homo sapiens
PTRQISSID

SEQ ID NO: 2136 - protein, 9 aa, Homo sapiens
TRQISSIDT

SEQ ID NO: 2137 - protein, 9 aa, Homo sapiens
ISSIDTDPP

SEQ ID NO: 2138 - protein, 9 aa, Homo sapiens
SRTPTRQIS

SEQ ID NO: 2139 - protein, 9 aa, Homo sapiens
RQISSSDTD

SEQ ID NO: 2140 - protein, 9 aa, Homo sapiens
QISSSDTDP

SEQ ID NO: 2141 - protein, 9 aa, Homo sapiens
SSSDTDPPA

SEQ ID NO: 2142 - protein, 9 aa, Homo sapiens
TPTRQISSS

SEQ ID NO: 2143 - protein, 9 aa, Homo sapiens
PTRQISSSD

SEQ ID NO: 2144 - protein, 9 aa, Homo sapiens
TRQISSSDT

SEQ ID NO: 2145 - protein, 9 aa, Homo sapiens
ISSSDTDPP

SEQ ID NO: 2146 - protein, 9 aa, Homo sapiens
RQIGSSDTD

SEQ ID NO: 2147 - protein, 9 aa, Homo sapiens
GSSDTDPPA

SEQ ID NO: 2148 - protein, 9 aa, Homo sapiens
QIGSSDTDP

SEQ ID NO: 2149 - protein, 9 aa, Homo sapiens
TPTRQIGSS

SEQ ID NO: 2150 - protein, 9 aa, Homo sapiens
PTRQIGSSD

SEQ ID NO: 2151 - protein, 9 aa, Homo sapiens
IGSSDTDPP

SEQ ID NO: 2152 - protein, 9 aa, Homo sapiens
SSDTDPPAD

SEQ ID NO: 2153 - protein, 9 aa, Homo sapiens
TRQIGSSDT

SEQ ID NO: 2154 - protein, 9 aa, Homo sapiens
SDTDPPADG

SEQ ID NO: 2155 - protein, 9 aa, Homo sapiens
SRGQALRRA

SEQ ID NO: 2156 - protein, 9 aa, Homo sapiens
RGQALRRAQ

SEQ ID NO: 2157 - protein, 10 aa, Homo sapiens
AVGLLTVISK

SEQ ID NO: 2158 - protein, 10 aa, Homo sapiens
GTALLCYSCK

SEQ ID NO: 2159 - protein, 10 aa, Homo sapiens
QLGEQCWTAR

SEQ ID NO: 2160 - protein, 10 aa, Homo sapiens
QVSNEDCLQV

SEQ ID NO: 2161 - protein, 10 aa, Homo sapiens
CVDDSQDYYV

SEQ ID NO: 2162 - protein, 10 aa, Homo sapiens
RIRAVGLLTV

SEQ ID NO: 2163 - protein, 10 aa, Homo sapiens
GLLLWGPGQL

SEQ ID NO: 2164 - protein, 10 aa, Homo sapiens
KAVLLALLMA

SEQ ID NO: 2165 - protein, 10 aa, Homo sapiens
TQLGEQCWTA

SEQ ID NO: 2166 - protein, 10 aa, Homo sapiens
LTVISKGCSL

SEQ ID NO: 2167 - protein, 10 aa, Homo sapiens
GLALQPGTAL

SEQ ID NO: 2168 - protein, 10 aa, Homo sapiens
LQPAAAILAL

SEQ ID NO: 2169 - protein, 10 aa, Homo sapiens
ALLPALGLLL

SEQ ID NO: 2170 - protein, 10 aa, Homo sapiens
LQPGTALLCY

SEQ ID NO: 2171 - protein, 10 aa, Homo sapiens
WTARIRAVGL

SEQ ID NO: 2172 - protein, 10 aa, Homo sapiens
ILALLPALGL

SEQ ID NO: 2173 - protein, 10 aa, Homo sapiens
ALQPAAAILA

SEQ ID NO: 2174 - protein, 10 aa, Homo sapiens
LLPALGLLLW

SEQ ID NO: 2175 - protein, 10 aa, Homo sapiens
KAQVSNEDCL

SEQ ID NO: 2176 - protein, 10 aa, Homo sapiens
DSQDYYVGKK

SEQ ID NO: 2177 - protein, 10 aa, Homo sapiens
AVLLALLMAG

SEQ ID NO: 2178 - protein, 10 aa, Homo sapiens
LALLMAGLAL

SEQ ID NO: 2179 - protein, 10 aa, Homo sapiens
VLLALLMAGL

SEQ ID NO: 2180 - protein, 10 aa, Homo sapiens
GAHALQPAAA

SEQ ID NO: 2181 - protein, 10 aa, Homo sapiens
DDSQDYYVGK

SEQ ID NO: 2182 - protein, 10 aa, Homo sapiens
LLCYSCKAQV

SEQ ID NO: 2183 - protein, 10 aa, Homo sapiens
AAAILALLPA

SEQ ID NO: 2184 - protein, 10 aa, Homo sapiens
QVENCTQLGE

SEQ ID NO: 2185 - protein, 10 aa, Homo sapiens
CLQVENCTQL

SEQ ID NO: 2186 - protein, 10 aa, Homo sapiens
LLALLMAGLA

SEQ ID NO: 2187 - protein, 10 aa, Homo sapiens
EQCWTARIRA

SEQ ID NO: 2188 - protein, 10 aa, Homo sapiens
GEQCWTARIR

SEQ ID NO: 2189 - protein, 10 aa, Homo sapiens
TALLCYSCKA

SEQ ID NO: 2190 - protein, 10 aa, Homo sapiens
LALLPALGLL

SEQ ID NO: 2191 - protein, 10 aa, Homo sapiens
NCVDDSQDYY

SEQ ID NO: 2192 - protein, 10 aa, Homo sapiens
TVISKGCSLN

SEQ ID NO: 2193 - protein, 10 aa, Homo sapiens
AAILALLPAL

SEQ ID NO: 2194 - protein, 10 aa, Homo sapiens
LALQPGTALL

SEQ ID NO: 2195 - protein, 10 aa, Homo sapiens
HALQPAAAIL

SEQ ID NO: 2196 - protein, 10 aa, Homo sapiens
DTDLCNASGA

SEQ ID NO: 2197 - protein, 10 aa, Homo sapiens
ITCCDTDLCN

SEQ ID NO: 2198 - protein, 10 aa, Homo sapiens
LCNASGAHAL

SEQ ID NO: 2199 - protein, 10 aa, Homo sapiens
TCCDTDLCNA

SEQ ID NO: 2200 - protein, 10 aa, Homo sapiens
TARIRAVGLL

SEQ ID NO: 2201 - protein, 10 aa, Homo sapiens
YVGKKNITCC

SEQ ID NO: 2202 - protein, 10 aa, Homo sapiens
QPAAAILALL

SEQ ID NO: 2203 - protein, 10 aa, Homo sapiens
NCTQLGEQCW

SEQ ID NO: 2204 - protein, 10 aa, Homo sapiens
KNITCCDTDL

SEQ ID NO: 2205 - protein, 10 aa, Homo sapiens
LLMAGLALQP

SEQ ID NO: 2206 - protein, 10 aa, Homo sapiens
YYVGKKNITC

SEQ ID NO: 2207 - protein, 10 aa, Homo sapiens
DLCNASGAHA

SEQ ID NO: 2208 - protein, 10 aa, Homo sapiens
CTQLGEQCWT

SEQ ID NO: 2209 - protein, 10 aa, Homo sapiens
AQVSNEDCLQ

SEQ ID NO: 2210 - protein, 10 aa, Homo sapiens
RAVGLLTVIS

SEQ ID NO: 2211 - protein, 10 aa, Homo sapiens
LQVENCTQLG

SEQ ID NO: 2212 - protein, 10 aa, Homo sapiens
GLLTVISKGC

SEQ ID NO: 2213 - protein, 10 aa, Homo sapiens
ALQPGTALLC

SEQ ID NO: 2214 - protein, 10 aa, Homo sapiens
VISKGCSLNC

SEQ ID NO: 2215 - protein, 10 aa, Homo sapiens
GCSLNCVDDS

SEQ ID NO: 2216 - protein, 10 aa, Homo sapiens
AILALLPALG

SEQ ID NO: 2217 - protein, 10 aa, Homo sapiens
ALLMAGLALQ

SEQ ID NO: 2218 - protein, 10 aa, Homo sapiens
NITCCDTDLC

SEQ ID NO: 2219 - protein, 10 aa, Homo sapiens
QCWTARIRAV

SEQ ID NO: 2220 - protein, 10 aa, Homo sapiens
LNCVDDSQDY

SEQ ID NO: 2221 - protein, 10 aa, Homo sapiens
MKAVLLALLM

SEQ ID NO: 2222 - protein, 10 aa, Homo sapiens
LPALGLLLWG

SEQ ID NO: 2223 - protein, 10 aa, Homo sapiens
LMAGLALQPG

SEQ ID NO: 2224 - protein, 10 aa, Homo sapiens
LCYSCKAQVS

SEQ ID NO: 2225 - protein, 10 aa, Homo sapiens
CYSCKAQVSN

SEQ ID NO: 2226 - protein, 10 aa, Homo sapiens
SLNCVDDSQD

SEQ ID NO: 2227 - protein, 10 aa, Homo sapiens
ALGLLLWGPG

SEQ ID NO: 2228 - protein, 10 aa, Homo sapiens
LLTVISKGCS

SEQ ID NO: 2229 - protein, 10 aa, Homo sapiens
NASGAHALQP

SEQ ID NO: 2230 - protein, 10 aa, Homo sapiens
ALLCYSCKAQ

SEQ ID NO: 2231 - protein, 10 aa, Homo sapiens
SQDYYVGKKN

SEQ ID NO: 2232 - protein, 10 aa, Homo sapiens
AGLALQPGTA

SEQ ID NO: 2233 - protein, 10 aa, Homo sapiens
TDLCNASGAH

SEQ ID NO: 2234 - protein, 10 aa, Homo sapiens
DYYVGKKNIT

SEQ ID NO: 2235 - protein, 10 aa, Homo sapiens
QPGTALLCYS

SEQ ID NO: 2236 - protein, 10 aa, Homo sapiens
MAGLALQPGT

SEQ ID NO: 2237 - protein, 10 aa, Homo sapiens
CCDTDLCNAS

SEQ ID NO: 2238 - protein, 10 aa, Homo sapiens
QDYYVGKKNI

SEQ ID NO: 2239 - protein, 10 aa, Homo sapiens
ASGAHALQPA

SEQ ID NO: 2240 - protein, 10 aa, Homo sapiens
IRAVGLLTVI

SEQ ID NO: 2241 - protein, 10 aa, Homo sapiens
SGAHALQPAA

SEQ ID NO: 2242 - protein, 10 aa, Homo sapiens
ISKGCSLNCV

SEQ ID NO: 2243 - protein, 10 aa, Homo sapiens
AHALQPAAAI

SEQ ID NO: 2244 - protein, 10 aa, Homo sapiens
LGEQCWTARI

SEQ ID NO: 2245 - protein, 10 aa, Homo sapiens
SCKAQVSNED

SEQ ID NO: 2246 - protein, 10 aa, Homo sapiens
DCLQVENCTQ

SEQ ID NO: 2247 - protein, 10 aa, Homo sapiens
ARIRAVGLLT

SEQ ID NO: 2248 - protein, 10 aa, Homo sapiens
PALGLLLWGP

SEQ ID NO: 2249 - protein, 10 aa, Homo sapiens
KKNITCCDTD

SEQ ID NO: 2250 - protein, 10 aa, Homo sapiens
KGCSLNCVDD

SEQ ID NO: 2251 - protein, 10 aa, Homo sapiens
GKKNITCCDT

SEQ ID NO: 2252 - protein, 10 aa, Homo sapiens
NEDCLQVENC

SEQ ID NO: 2253 - protein, 10 aa, Homo sapiens
VENCTQLGEQ

SEQ ID NO: 2254 - protein, 10 aa, Homo sapiens
CNASGAHALQ

SEQ ID NO: 2255 - protein, 10 aa, Homo sapiens
PAAAILALLP

SEQ ID NO: 2256 - protein, 10 aa, Homo sapiens
SNEDCLQVEN

SEQ ID NO: 2257 - protein, 10 aa, Homo sapiens
MTHRTTTWAR

SEQ ID NO: 2258 - protein, 10 aa, Homo sapiens
TTTWARRTSR

SEQ ID NO: 2259 - protein, 10 aa, Homo sapiens
GVVPQASVPL

SEQ ID NO: 2260 - protein, 10 aa, Homo sapiens
APSRGQALRR

SEQ ID NO: 2261 - protein, 10 aa, Homo sapiens
HPDPPMALSR

SEQ ID NO: 2262 - protein, 10 aa, Homo sapiens
AFSTLNPVLR

SEQ ID NO: 2263 - protein, 10 aa, Homo sapiens
CCSGDPASYR

SEQ ID NO: 2264 - protein, 10 aa, Homo sapiens
TPAGPMPCSR

SEQ ID NO: 2265 - protein, 10 aa, Homo sapiens
RTPTRQIGSI

SEQ ID NO: 2266 - protein, 10 aa, Homo sapiens
HLFPQEAFPA

SEQ ID NO: 2267 - protein, 10 aa, Homo sapiens
AVTPTCATPA

SEQ ID NO: 2268 - protein, 10 aa, Homo sapiens
TTWARRTSRA

SEQ ID NO: 2269 - protein, 10 aa, Homo sapiens
VVPQASVPLL

SEQ ID NO: 2270 - protein, 10 aa, Homo sapiens
RLPPSLRCSL

SEQ ID NO: 2271 - protein, 10 aa, Homo sapiens
GAPLQPTLGV

SEQ ID NO: 2272 - protein, 10 aa, Homo sapiens
LTHPAQWEPV

SEQ ID NO: 2273 - protein, 10 aa, Homo sapiens
SQVWSVVSPA

SEQ ID NO: 2274 - protein, 10 aa, Homo sapiens
TMYVCAPVPH

SEQ ID NO: 2275 - protein, 10 aa, Homo sapiens
PMALSRTPTR

SEQ ID NO: 2276 - protein, 10 aa, Homo sapiens
IYDLSQVWSV

SEQ ID NO: 2277 - protein, 10 aa, Homo sapiens
WSVVSPAPSR

SEQ ID NO: 2278 - protein, 10 aa, Homo sapiens
VLVPEAHPNA

SEQ ID NO: 2279 - protein, 10 aa, Homo sapiens
GPSNPLCCCF

SEQ ID NO: 2280 - protein, 10 aa, Homo sapiens
GPAFSTLNPV

SEQ ID NO: 2281 - protein, 10 aa, Homo sapiens
TLGVVPQASV

SEQ ID NO: 2282 - protein, 10 aa, Homo sapiens
TLNPVLRHLF

SEQ ID NO: 2283 - protein, 10 aa, Homo sapiens
QVWSVVSPAP

SEQ ID NO: 2284 - protein, 10 aa, Homo sapiens
VPHPDPPMAL

SEQ ID NO: 2285 - protein, 10 aa, Homo sapiens
PAPSRGQALR

SEQ ID NO: 2286 - protein, 10 aa, Homo sapiens
VLRHLFPQEA

SEQ ID NO: 2287 - protein, 10 aa, Homo sapiens
PCSRLPPSLR

SEQ ID NO: 2288 - protein, 10 aa, Homo sapiens
HPNASLTMYV

SEQ ID NO: 2289 - protein, 10 aa, Homo sapiens
SLTMYVCAPV

SEQ ID NO: 2290 - protein, 10 aa, Homo sapiens
AFPAHPIYDL

SEQ ID NO: 2291 - protein, 10 aa, Homo sapiens
THRTTTWARR

SEQ ID NO: 2292 - protein, 10 aa, Homo sapiens
HPIYDLSQVW

SEQ ID NO: 2293 - protein, 10 aa, Homo sapiens
APVPHPDPPM

SEQ ID NO: 2294 - protein, 10 aa, Homo sapiens
SVVSPAPSRG

SEQ ID NO: 2295 - protein, 10 aa, Homo sapiens
APLQPTLGVV

SEQ ID NO: 2296 - protein, 10 aa, Homo sapiens
RTSRAVTPTC

SEQ ID NO: 2297 - protein, 10 aa, Homo sapiens
VPLLTHPAQW

SEQ ID NO: 2298 - protein, 10 aa, Homo sapiens
RQIGSIDTDP

SEQ ID NO: 2299 - protein, 10 aa, Homo sapiens
GPMPCSRLPP

SEQ ID NO: 2300 - protein, 10 aa, Homo sapiens
RLWGAPLQPT

SEQ ID NO: 2301 - protein, 10 aa, Homo sapiens
SVPLLTHPAQ

SEQ ID NO: 2302 - protein, 10 aa, Homo sapiens
ACCSGDPASY

SEQ ID NO: 2303 - protein, 10 aa, Homo sapiens
NASLTMYVCA

SEQ ID NO: 2304 - protein, 10 aa, Homo sapiens
LTMYVCAPVP

SEQ ID NO: 2305 - protein, 10 aa, Homo sapiens
YVCAPVPHPD

SEQ ID NO: 2306 - protein, 10 aa, Homo sapiens
LVPEAHPNAS

SEQ ID NO: 2307 - protein, 10 aa, Homo sapiens
HPAQWEPVLV

SEQ ID NO: 2308 - protein, 10 aa, Homo sapiens
LPPSLRCSLH

SEQ ID NO: 2309 - protein, 10 aa, Homo sapiens
QPTLGVVPQA

SEQ ID NO: 2310 - protein, 10 aa, Homo sapiens
VPEAHPNASL

SEQ ID NO: 2311 - protein, 10 aa, Homo sapiens
MPCSRLPPSL

SEQ ID NO: 2312 - protein, 10 aa, Homo sapiens
PVPHPDPPMA

SEQ ID NO: 2313 - protein, 10 aa, Homo sapiens
LFPQEAFPAH

SEQ ID NO: 2314 - protein, 10 aa, Homo sapiens
SPAPSRGQAL

SEQ ID NO: 2315 - protein, 10 aa, Homo sapiens
CFHGPAFSTL

SEQ ID NO: 2316 - protein, 10 aa, Homo sapiens
LCCCFHGPAF

SEQ ID NO: 2317 - protein, 10 aa, Homo sapiens
STLNPVLRHL

SEQ ID NO: 2318 - protein, 10 aa, Homo sapiens
CCFHGPAFST

SEQ ID NO: 2319 - protein, 10 aa, Homo sapiens
PQASVPLLTH

SEQ ID NO: 2320 - protein, 10 aa, Homo sapiens
AQWEPVLVPE

SEQ ID NO: 2321 - protein, 10 aa, Homo sapiens
EAHPNASLTM

SEQ ID NO: 2322 - protein, 10 aa, Homo sapiens
DPASYRLWGA

SEQ ID NO: 2323 - protein, 10 aa, Homo sapiens
ATPAGPMPCS

SEQ ID NO: 2324 - protein, 10 aa, Homo sapiens
VTPTCATPAG

SEQ ID NO: 2325 - protein, 10 aa, Homo sapiens
PTCATPAGPM

SEQ ID NO: 2326 - protein, 10 aa, Homo sapiens
NPVLRHLFPQ

SEQ ID NO: 2327 - protein, 10 aa, Homo sapiens
RAVTPTCATP

SEQ ID NO: 2328 - protein, 10 aa, Homo sapiens
LLTHPAQWEP

SEQ ID NO: 2329 - protein, 10 aa, Homo sapiens
MYVCAPVPHP

SEQ ID NO: 2330 - protein, 10 aa, Homo sapiens
LQPTLGVVPQ

SEQ ID NO: 2331 - protein, 10 aa, Homo sapiens
RCSLHSACCS

SEQ ID NO: 2332 - protein, 10 aa, Homo sapiens
PQEAFPAHPI

SEQ ID NO: 2333 - protein, 10 aa, Homo sapiens
WEPVLVPEAH

SEQ ID NO: 2334 - protein, 10 aa, Homo sapiens
QEAFPAHPIY

SEQ ID NO: 2335 - protein, 10 aa, Homo sapiens
SRGQALRRAR

SEQ ID NO: 2336 - protein, 10 aa, Homo sapiens
SIDTDPPADG

SEQ ID NO: 2337 - protein, 10 aa, Homo sapiens
PLCCCFHGPA

SEQ ID NO: 2338 - protein, 10 aa, Homo sapiens
VPQASVPLLT

SEQ ID NO: 2339 - protein, 10 aa, Homo sapiens
FSTLNPVLRH

SEQ ID NO: 2340 - protein, 10 aa, Homo sapiens
CATPAGPMPC

SEQ ID NO: 2341 - protein, 10 aa, Homo sapiens
QIGSIDTDPP

SEQ ID NO: 2342 - protein, 10 aa, Homo sapiens
PAFSTLNPVL

SEQ ID NO: 2343 - protein, 10 aa, Homo sapiens
SLRCSLHSAC

SEQ ID NO: 2344 - protein, 10 aa, Homo sapiens
SYRLWGAPLQ

SEQ ID NO: 2345 - protein, 10 aa, Homo sapiens
ASYRLWGAPL

SEQ ID NO: 2346 - protein, 10 aa, Homo sapiens
SLHSACCSGD

SEQ ID NO: 2347 - protein, 10 aa, Homo sapiens
ALSRTPTRQI

SEQ ID NO: 2348 - protein, 10 aa, Homo sapiens
CSGDPASYRL

SEQ ID NO: 2349 - protein, 10 aa, Homo sapiens
ASVPLLTHPA

SEQ ID NO: 2350 - protein, 10 aa, Homo sapiens
RTTTWARRTS

SEQ ID NO: 2351 - protein, 10 aa, Homo sapiens
DTDPPADGPS

SEQ ID NO: 2352 - protein, 10 aa, Homo sapiens
YDLSQVWSVV

SEQ ID NO: 2353 - protein, 10 aa, Homo sapiens
PVLVPEAHPN

SEQ ID NO: 2354 - protein, 10 aa, Homo sapiens
NPLCCCFHGP

SEQ ID NO: 2355 - protein, 10 aa, Homo sapiens
PVLRHLFPQE

SEQ ID NO: 2356 - protein, 10 aa, Homo sapiens
MALSRTPTRQ

SEQ ID NO: 2357 - protein, 10 aa, Homo sapiens
RLLPSLRCSL

SEQ ID NO: 2358 - protein, 10 aa, Homo sapiens
LLPSLRCSLH

SEQ ID NO: 2359 - protein, 10 aa, Homo sapiens
PCSRLLPSLR

SEQ ID NO: 2360 - protein, 10 aa, Homo sapiens
GPMPCSRLLP

SEQ ID NO: 2361 - protein, 10 aa, Homo sapiens
MPCSRLLPSL

SEQ ID NO: 2362 - protein, 10 aa, Homo sapiens
LPSLRCSLHS

SEQ ID NO: 2363 - protein, 10 aa, Homo sapiens
PMPCSRLLPS

SEQ ID NO: 2364 - protein, 10 aa, Homo sapiens
CSRLLPSLRC

SEQ ID NO: 2365 - protein, 10 aa, Homo sapiens
AGPMPCSRLL

SEQ ID NO: 2366 - protein, 10 aa, Homo sapiens
SRLLPSLRCS

SEQ ID NO: 2367 - protein, 10 aa, Homo sapiens
CCSGDPASSR

SEQ ID NO: 2368 - protein, 10 aa, Homo sapiens
DPASSRLWGA

SEQ ID NO: 2369 - protein, 10 aa, Homo sapiens
ASSRLWGAPL

SEQ ID NO: 2370 - protein, 10 aa, Homo sapiens
ACCSGDPASS

SEQ ID NO: 2371 - protein, 10 aa, Homo sapiens
CSGDPASSRL

SEQ ID NO: 2372 - protein, 10 aa, Homo sapiens
GDPASSRLWG

SEQ ID NO: 2373 - protein, 10 aa, Homo sapiens
SRLWGAPLQP

SEQ ID NO: 2374 - protein, 10 aa, Homo sapiens
SGDPASSRLW

SEQ ID NO: 2375 - protein, 10 aa, Homo sapiens
PASSRLWGAP

SEQ ID NO: 2376 - protein, 10 aa, Homo sapiens
SSRLWGAPLQ

SEQ ID NO: 2377 - protein, 10 aa, Homo sapiens
LTDPAQWEPV

SEQ ID NO: 2378 - protein, 10 aa, Homo sapiens
VPLLTDPAQW

SEQ ID NO: 2379 - protein, 10 aa, Homo sapiens
SVPLLTDPAQ

SEQ ID NO: 2380 - protein, 10 aa, Homo sapiens
LLTDPAQWEP

SEQ ID NO: 2381 - protein, 10 aa, Homo sapiens
DPAQWEPVLV

SEQ ID NO: 2382 - protein, 10 aa, Homo sapiens
ASVPLLTDPA

SEQ ID NO: 2383 - protein, 10 aa, Homo sapiens
TDPAQWEPVL

SEQ ID NO: 2384 - protein, 10 aa, Homo sapiens
QASVPLLTDP

SEQ ID NO: 2385 - protein, 10 aa, Homo sapiens
PQASVPLLTD

SEQ ID NO: 2386 - protein, 10 aa, Homo sapiens
PLLTDPAQWE

SEQ ID NO: 2387 - protein, 10 aa, Homo sapiens
LTDLAQWEPV

SEQ ID NO: 2388 - protein, 10 aa, Homo sapiens
SVPLLTDLAQ

SEQ ID NO: 2389 - protein, 10 aa, Homo sapiens
VPLLTDLAQW

SEQ ID NO: 2390 - protein, 10 aa, Homo sapiens
QASVPLLTDL

SEQ ID NO: 2391 - protein, 10 aa, Homo sapiens
DLAQWEPVLV

SEQ ID NO: 2392 - protein, 10 aa, Homo sapiens
LLTDLAQWEP

SEQ ID NO: 2393 - protein, 10 aa, Homo sapiens
TDLAQWEPVL

SEQ ID NO: 2394 - protein, 10 aa, Homo sapiens
ASVPLLTDLA

SEQ ID NO: 2395 - protein, 10 aa, Homo sapiens
PLLTDLAQWE

SEQ ID NO: 2396 - protein, 10 aa, Homo sapiens
LTHLAQWEPV

SEQ ID NO: 2397 - protein, 10 aa, Homo sapiens
HLAQWEPVLV

SEQ ID NO: 2398 - protein, 10 aa, Homo sapiens
SVPLLTHLAQ

SEQ ID NO: 2399 - protein, 10 aa, Homo sapiens
VPLLTHLAQW

SEQ ID NO: 2400 - protein, 10 aa, Homo sapiens
QASVPLLTHL

SEQ ID NO: 2401 - protein, 10 aa, Homo sapiens
LLTHLAQWEP

SEQ ID NO: 2402 - protein, 10 aa, Homo sapiens
LAQWEPVLVP

SEQ ID NO: 2403 - protein, 10 aa, Homo sapiens
THLAQWEPVL

SEQ ID NO: 2404 - protein, 10 aa, Homo sapiens
ASVPLLTHLA

SEQ ID NO: 2405 - protein, 10 aa, Homo sapiens
PLLTHLAQWE

SEQ ID NO: 2406 - protein, 10 aa, Homo sapiens
TMYVCTPVPH

SEQ ID NO: 2407 - protein, 10 aa, Homo sapiens
SLTMYVCTPV

SEQ ID NO: 2408 - protein, 10 aa, Homo sapiens
TPVPHPDPPM

SEQ ID NO: 2409 - protein, 10 aa, Homo sapiens
LTMYVCTPVP

SEQ ID NO: 2410 - protein, 10 aa, Homo sapiens
YVCTPVPHPD

SEQ ID NO: 2411 - protein, 10 aa, Homo sapiens
CTPVPHPDPP

SEQ ID NO: 2412 - protein, 10 aa, Homo sapiens
MYVCTPVPHP

SEQ ID NO: 2413 - protein, 10 aa, Homo sapiens
VCTPVPHPDP

SEQ ID NO: 2414 - protein, 10 aa, Homo sapiens
NASLTMYVCT

SEQ ID NO: 2415 - protein, 10 aa, Homo sapiens
ASLTMYVCTP

SEQ ID NO: 2416 - protein, 10 aa, Homo sapiens
RTPTRQISSI

SEQ ID NO: 2417 - protein, 10 aa, Homo sapiens
RQISSIDTDP

SEQ ID NO: 2418 - protein, 10 aa, Homo sapiens
QISSIDTDPP

SEQ ID NO: 2419 - protein, 10 aa, Homo sapiens
ISSIDTDPPA

SEQ ID NO: 2420 - protein, 10 aa, Homo sapiens
PTRQISSIDT

SEQ ID NO: 2421 - protein, 10 aa, Homo sapiens
TPTRQISSID

SEQ ID NO: 2422 - protein, 10 aa, Homo sapiens
SRTPTRQISS

SEQ ID NO: 2423 - protein, 10 aa, Homo sapiens
SSIDTDPPAD

SEQ ID NO: 2424 - protein, 10 aa, Homo sapiens
TRQISSIDTD

SEQ ID NO: 2425 - protein, 10 aa, Homo sapiens
LSRTPTRQIS

SEQ ID NO: 2426 - protein, 10 aa, Homo sapiens
RTPTRQISSS

SEQ ID NO: 2427 - protein, 10 aa, Homo sapiens
RQISSSDTDP

SEQ ID NO: 2428 - protein, 10 aa, Homo sapiens
QISSSDTDPP

SEQ ID NO: 2429 - protein, 10 aa, Homo sapiens
ISSSDTDPPA

SEQ ID NO: 2430 - protein, 10 aa, Homo sapiens
TPTRQISSSD

SEQ ID NO: 2431 - protein, 10 aa, Homo sapiens
PTRQISSSDT

SEQ ID NO: 2432 - protein, 10 aa, Homo sapiens
TRQISSSDTD

SEQ ID NO: 2433 - protein, 10 aa, Homo sapiens
SSSDTDPPAD

SEQ ID NO: 2434 - protein, 10 aa, Homo sapiens
RTPTRQISSS

SEQ ID NO: 2435 - protein, 10 aa, Homo sapiens
RQISSSDTDP

SEQ ID NO: 2436 - protein, 10 aa, Homo sapiens
QISSSDTDPP

SEQ ID NO: 2437 - protein, 10 aa, Homo sapiens
ISSSDTDPPA

SEQ ID NO: 2438 - protein, 10 aa, Homo sapiens
TPTRQISSSD

SEQ ID NO: 2439 - protein, 10 aa, Homo sapiens
PTRQISSSDT

SEQ ID NO: 2440 - protein, 10 aa, Homo sapiens
TRQISSSDTD

SEQ ID NO: 2441 - protein, 10 aa, Homo sapiens
SSSDTDPPAD

SEQ ID NO: 2442 - protein, 10 aa, Homo sapiens
SRGQALRRAQ

SEQ ID NO: 2443 - protein, 10 aa, Homo sapiens
PSRGQALRRA

SEQ ID NO: 2444 - protein, 9 aa, Homo sapiens
DYYVGKKNI

SEQ ID NO: 2445 - protein, 9 aa, Homo sapiens
YYVGKKNIT

SEQ ID NO: 2446 - protein, 9 aa, Homo sapiens
LQVENCTQL

SEQ ID NO: 2447 - protein, 9 aa, Homo sapiens
ALLPALGLL

SEQ ID NO: 2448 - protein, 9 aa, Homo sapiens
ALQPAAAIL

SEQ ID NO: 2449 - protein, 9 aa, Homo sapiens
LLPALGLLL

SEQ ID NO: 2450 - protein, 9 aa, Homo sapiens
ALQPGTALL

SEQ ID NO: 2451 - protein, 9 aa, Homo sapiens
AILALLPAL

SEQ ID NO: 2452 - protein, 9 aa, Homo sapiens
TVISKGCSL

SEQ ID NO: 2453 - protein, 9 aa, Homo sapiens
CYSCKAQVS

SEQ ID NO: 2454 - protein, 9 aa, Homo sapiens
ALLMAGLAL

SEQ ID NO: 2455 - protein, 9 aa, Homo sapiens
LLLWGPGQL

SEQ ID NO: 2456 - protein, 9 aa, Homo sapiens
AQVSNEDCL

SEQ ID NO: 2457 - protein, 9 aa, Homo sapiens
LALQPGTAL

SEQ ID NO: 2458 - protein, 9 aa, Homo sapiens
LALLPALGL

SEQ ID NO: 2459 - protein, 9 aa, Homo sapiens
LLALLMAGL

SEQ ID NO: 2460 - protein, 9 aa, Homo sapiens
QPAAAILAL

SEQ ID NO: 2461 - protein, 9 aa, Homo sapiens
NITCCDTDL

SEQ ID NO: 2462 - protein, 9 aa, Homo sapiens
TARIRAVGL

SEQ ID NO: 2463 - protein, 9 aa, Homo sapiens
CNASGAHAL

SEQ ID NO: 2464 - protein, 9 aa, Homo sapiens
RAVGLLTVI

SEQ ID NO: 2465 - protein, 9 aa, Homo sapiens
KAVLLALLM

SEQ ID NO: 2466 - protein, 9 aa, Homo sapiens
HALQPAAAI

SEQ ID NO: 2467 - protein, 9 aa, Homo sapiens
ARIRAVGLL

SEQ ID NO: 2468 - protein, 9 aa, Homo sapiens
PAAAILALL

SEQ ID NO: 2469 - protein, 9 aa, Homo sapiens
MKAVLLALL

SEQ ID NO: 2470 - protein, 9 aa, Homo sapiens
KAQVSNEDC

SEQ ID NO: 2471 - protein, 9 aa, Homo sapiens
RIRAVGLLT

SEQ ID NO: 2472 - protein, 9 aa, Homo sapiens
DCLQVENCT

SEQ ID NO: 2473 - protein, 9 aa, Homo sapiens
NCVDDSQDY

SEQ ID NO: 2474 - protein, 9 aa, Homo sapiens
CTQLGEQCW

SEQ ID NO: 2475 - protein, 9 aa, Homo sapiens
VSNEDCLQV

SEQ ID NO: 2476 - protein, 9 aa, Homo sapiens
AGLALQPGT

SEQ ID NO: 2477 - protein, 9 aa, Homo sapiens
ALLCYSCKA

SEQ ID NO: 2478 - protein, 9 aa, Homo sapiens
GEQCWTARI

SEQ ID NO: 2479 - protein, 9 aa, Homo sapiens
LALLMAGLA

SEQ ID NO: 2480 - protein, 9 aa, Homo sapiens
TQLGEQCWT

SEQ ID NO: 2481 - protein, 9 aa, Homo sapiens
AVLLALLMA

SEQ ID NO: 2482 - protein, 9 aa, Homo sapiens
LTVISKGCS

SEQ ID NO: 2483 - protein, 9 aa, Homo sapiens
LQPAAAILA

SEQ ID NO: 2484 - protein, 9 aa, Homo sapiens
LQPGTALLC

SEQ ID NO: 2485 - protein, 9 aa, Homo sapiens
CSLNCVDDS

SEQ ID NO: 2486 - protein, 9 aa, Homo sapiens
AAILALLPA

SEQ ID NO: 2487 - protein, 9 aa, Homo sapiens
LCNASGAHA

SEQ ID NO: 2488 - protein, 9 aa, Homo sapiens
LLTVISKGC

SEQ ID NO: 2489 - protein, 9 aa, Homo sapiens
AVGLLTVIS

SEQ ID NO: 2490 - protein, 9 aa, Homo sapiens
TCCDTDLCN

SEQ ID NO: 2491 - protein, 9 aa, Homo sapiens
QLGEQCWTA

SEQ ID NO: 2492 - protein, 9 aa, Homo sapiens
GTALLCYSC

SEQ ID NO: 2493 - protein, 9 aa, Homo sapiens
NCTQLGEQC

SEQ ID NO: 2494 - protein, 9 aa, Homo sapiens
GAHALQPAA

SEQ ID NO: 2495 - protein, 9 aa, Homo sapiens
CVDDSQDYY

SEQ ID NO: 2496 - protein, 9 aa, Homo sapiens
SGAHALQPA

SEQ ID NO: 2497 - protein, 9 aa, Homo sapiens
LCYSCKAQV

SEQ ID NO: 2498 - protein, 9 aa, Homo sapiens
VISKGCSLN

SEQ ID NO: 2499 - protein, 9 aa, Homo sapiens
QCWTARIRA

SEQ ID NO: 2500 - protein, 9 aa, Homo sapiens
QPGTALLCY

SEQ ID NO: 2501 - protein, 9 aa, Homo sapiens
YVGKKNITC

SEQ ID NO: 2502 - protein, 9 aa, Homo sapiens
ITCCDTDLC

SEQ ID NO: 2503 - protein, 9 aa, Homo sapiens
CCDTDLCNA

SEQ ID NO: 2504 - protein, 9 aa, Homo sapiens
YSCKAQVSN

SEQ ID NO: 2505 - protein, 9 aa, Homo sapiens
CWTARIRAV

SEQ ID NO: 2506 - protein, 9 aa, Homo sapiens
LPALGLLLW

SEQ ID NO: 2507 - protein, 9 aa, Homo sapiens
ISKGCSLNC

SEQ ID NO: 2508 - protein, 9 aa, Homo sapiens
VGKKNITCC

SEQ ID NO: 2509 - protein, 9 aa, Homo sapiens
GLALQPGTA

SEQ ID NO: 2510 - protein, 9 aa, Homo sapiens
KNITCCDTD

SEQ ID NO: 2511 - protein, 9 aa, Homo sapiens
KKNITCCDT

SEQ ID NO: 2512 - protein, 9 aa, Homo sapiens
KGCSLNCVD

SEQ ID NO: 2513 - protein, 9 aa, Homo sapiens
GLLTVISKG

SEQ ID NO: 2514 - protein, 9 aa, Homo sapiens
SNEDCLQVE

SEQ ID NO: 2515 - protein, 9 aa, Homo sapiens
SLNCVDDSQ

SEQ ID NO: 2516 - protein, 9 aa, Homo sapiens
LGLLLWGPG

SEQ ID NO: 2517 - protein, 9 aa, Homo sapiens
QVENCTQLG

SEQ ID NO: 2518 - protein, 9 aa, Homo sapiens
VLLALLMAG

SEQ ID NO: 2519 - protein, 9 aa, Homo sapiens
DSQDYYVGK

SEQ ID NO: 2520 - protein, 9 aa, Homo sapiens
CDTDLCNAS

SEQ ID NO: 2521 - protein, 9 aa, Homo sapiens
QDYYVGKKN

SEQ ID NO: 2522 - protein, 9 aa, Homo sapiens
LGEQCWTAR

SEQ ID NO: 2523 - protein, 9 aa, Homo sapiens
TALLCYSCK

SEQ ID NO: 2524 - protein, 9 aa, Homo sapiens
GLLLWGPGQ

SEQ ID NO: 2525 - protein, 9 aa, Homo sapiens
TDLCNASGA

SEQ ID NO: 2526 - protein, 9 aa, Homo sapiens
LLMAGLALQ

SEQ ID NO: 2527 - protein, 9 aa, Homo sapiens
VGLLTVISK

SEQ ID NO: 2528 - protein, 9 aa, Homo sapiens
CLQVENCTQ

SEQ ID NO: 2529 - protein, 9 aa, Homo sapiens
WTARIRAVG

SEQ ID NO: 2530 - protein, 9 aa, Homo sapiens
NEDCLQVEN

SEQ ID NO: 2531 - protein, 9 aa, Homo sapiens
AAAILALLP

SEQ ID NO: 2532 - protein, 9 aa, Homo sapiens
ALGLLLWGP

SEQ ID NO: 2533 - protein, 9 aa, Homo sapiens
SKGCSLNCV

SEQ ID NO: 2534 - protein, 9 aa, Homo sapiens
LMAGLALQP

SEQ ID NO: 2535 - protein, 9 aa, Homo sapiens
MAGLALQPG

SEQ ID NO: 2536 - protein, 9 aa, Homo sapiens
PGTALLCYS

SEQ ID NO: 2537 - protein, 9 aa, Homo sapiens
ILALLPALG

SEQ ID NO: 2538 - protein, 9 aa, Homo sapiens
SQDYYVGKK

SEQ ID NO: 2539 - protein, 9 aa, Homo sapiens
ENCTQLGEQ

SEQ ID NO: 2540 - protein, 9 aa, Homo sapiens
QVSNEDCLQ

SEQ ID NO: 2541 - protein, 9 aa, Homo sapiens
LLCYSCKAQ

SEQ ID NO: 2542 - protein, 9 aa, Homo sapiens
AHALQPAAA

SEQ ID NO: 2543 - protein, 9 aa, Homo sapiens
SCKAQVSNE

SEQ ID NO: 2544 - protein, 9 aa, Homo sapiens
SYRLWGAPL

SEQ ID NO: 2545 - protein, 9 aa, Homo sapiens
AFSTLNPVL

SEQ ID NO: 2546 - protein, 9 aa, Homo sapiens
TLNPVLRHL

SEQ ID NO: 2547 - protein, 9 aa, Homo sapiens
LPPSLRCSL

SEQ ID NO: 2548 - protein, 9 aa, Homo sapiens
VVPQASVPL

SEQ ID NO: 2549 - protein, 9 aa, Homo sapiens
VPQASVPLL

SEQ ID NO: 2550 - protein, 9 aa, Homo sapiens
AGPMPCSRL

SEQ ID NO: 2551 - protein, 9 aa, Homo sapiens
WGAPLQPTL

SEQ ID NO: 2552 - protein, 9 aa, Homo sapiens
IYDLSQVWS

SEQ ID NO: 2553 - protein, 9 aa, Homo sapiens
SGDPASYRL

SEQ ID NO: 2554 - protein, 9 aa, Homo sapiens
FPAHPIYDL

SEQ ID NO: 2555 - protein, 9 aa, Homo sapiens
HPAQWEPVL

SEQ ID NO: 2556 - protein, 9 aa, Homo sapiens
LNPVLRHLF

SEQ ID NO: 2557 - protein, 9 aa, Homo sapiens
CCCFHGPAF

SEQ ID NO: 2558 - protein, 9 aa, Homo sapiens
TPTRQIGSI

SEQ ID NO: 2559 - protein, 9 aa, Homo sapiens
LSRTPTRQI

SEQ ID NO: 2560 - protein, 9 aa, Homo sapiens
LFPQEAFPA

SEQ ID NO: 2561 - protein, 9 aa, Homo sapiens
MYVCAPVPH

SEQ ID NO: 2562 - protein, 9 aa, Homo sapiens
PAPSRGQAL

SEQ ID NO: 2563 - protein, 9 aa, Homo sapiens
RHLFPQEAF

SEQ ID NO: 2564 - protein, 9 aa, Homo sapiens
FHGPAFSTL

SEQ ID NO: 2565 - protein, 9 aa, Homo sapiens
CFHGPAFST

SEQ ID NO: 2566 - protein, 9 aa, Homo sapiens
TCATPAGPM

SEQ ID NO: 2567 - protein, 9 aa, Homo sapiens
PCSRLPPSL

SEQ ID NO: 2568 - protein, 9 aa, Homo sapiens
PADGPSNPL

SEQ ID NO: 2569 - protein, 9 aa, Homo sapiens
PSNPLCCCF

SEQ ID NO: 2570 - protein, 9 aa, Homo sapiens
RLPPSLRCS

SEQ ID NO: 2571 - protein, 9 aa, Homo sapiens
RTPTRQIGS

SEQ ID NO: 2572 - protein, 9 aa, Homo sapiens
RAVTPTCAT

SEQ ID NO: 2573 - protein, 9 aa, Homo sapiens
LTMYVCAPV

SEQ ID NO: 2574 - protein, 9 aa, Homo sapiens
RTSRAVTPT

SEQ ID NO: 2575 - protein, 9 aa, Homo sapiens
RTTTWARRT

SEQ ID NO: 2576 - protein, 9 aa, Homo sapiens
RCSLHSACC

SEQ ID NO: 2577 - protein, 9 aa, Homo sapiens
LVPEAHPNA

SEQ ID NO: 2578 - protein, 9 aa, Homo sapiens
VLVPEAHPN

SEQ ID NO: 2579 - protein, 9 aa, Homo sapiens
VPEAHPNAS

SEQ ID NO: 2580 - protein, 9 aa, Homo sapiens
SVPLLTHPA

SEQ ID NO: 2581 - protein, 9 aa, Homo sapiens
GSIDTDPPA

SEQ ID NO: 2582 - protein, 9 aa, Homo sapiens
TLGVVPQAS

SEQ ID NO: 2583 - protein, 9 aa, Homo sapiens
APLQPTLGV

SEQ ID NO: 2584 - protein, 9 aa, Homo sapiens
ATPAGPMPC

SEQ ID NO: 2585 - protein, 9 aa, Homo sapiens
LSQVWSVVS

SEQ ID NO: 2586 - protein, 9 aa, Homo sapiens
LGVVPQASV

SEQ ID NO: 2587 - protein, 9 aa, Homo sapiens
WSVVSPAPS

SEQ ID NO: 2588 - protein, 9 aa, Homo sapiens
HPIYDLSQV

SEQ ID NO: 2589 - protein, 9 aa, Homo sapiens
DGPSNPLCC

SEQ ID NO: 2590 - protein, 9 aa, Homo sapiens
HGPAFSTLN

SEQ ID NO: 2591 - protein, 9 aa, Homo sapiens
DPPMALSRT

SEQ ID NO: 2592 - protein, 9 aa, Homo sapiens
HPNASLTMY

SEQ ID NO: 2593 - protein, 9 aa, Homo sapiens
DPPADGPSN

SEQ ID NO: 2594 - protein, 9 aa, Homo sapiens
CSLHSACCS

SEQ ID NO: 2595 - protein, 9 aa, Homo sapiens
VTPTCATPA

SEQ ID NO: 2596 - protein, 9 aa, Homo sapiens
ASLTMYVCA

SEQ ID NO: 2597 - protein, 9 aa, Homo sapiens
QVWSVVSPA

SEQ ID NO: 2598 - protein, 9 aa, Homo sapiens
DLSQVWSVV

SEQ ID NO: 2599 - protein, 9 aa, Homo sapiens
TSRAVTPTC

SEQ ID NO: 2600 - protein, 9 aa, Homo sapiens
EAHPNASLT

SEQ ID NO: 2601 - protein, 9 aa, Homo sapiens
HPDPPMALS

SEQ ID NO: 2602 - protein, 9 aa, Homo sapiens
EAFPAHPIY

SEQ ID NO: 2603 - protein, 9 aa, Homo sapiens
SPAPSRGQA

SEQ ID NO: 2604 - protein, 9 aa, Homo sapiens
VPHPDPPMA

SEQ ID NO: 2605 - protein, 9 aa, Homo sapiens
LWGAPLQPT

SEQ ID NO: 2606 - protein, 9 aa, Homo sapiens
SLRCSLHSA

SEQ ID NO: 2607 - protein, 9 aa, Homo sapiens
MPCSRLPPS

SEQ ID NO: 2608 - protein, 9 aa, Homo sapiens
TWARRTSRA

SEQ ID NO: 2609 - protein, 9 aa, Homo sapiens
SACCSGDPA

SEQ ID NO: 2610 - protein, 9 aa, Homo sapiens
NASLTMYVC

SEQ ID NO: 2611 - protein, 9 aa, Homo sapiens
TPAGPMPCS

SEQ ID NO: 2612 - protein, 9 aa, Homo sapiens
WARRTSRAV

SEQ ID NO: 2613 - protein, 9 aa, Homo sapiens
ACCSGDPAS

SEQ ID NO: 2614 - protein, 9 aa, Homo sapiens
TTTWARRTS

SEQ ID NO: 2615 - protein, 9 aa, Homo sapiens
MTHRTTTWA

SEQ ID NO: 2616 - protein, 9 aa, Homo sapiens
GPSNPLCCC

SEQ ID NO: 2617 - protein, 9 aa, Homo sapiens
CCSGDPASY

SEQ ID NO: 2618 - protein, 9 aa, Homo sapiens
LCCCFHGPA

SEQ ID NO: 2619 - protein, 9 aa, Homo sapiens
CCFHGPAFS

SEQ ID NO: 2620 - protein, 9 aa, Homo sapiens
QEAFPAHPI

SEQ ID NO: 2621 - protein, 9 aa, Homo sapiens
AHPNASLTM

SEQ ID NO: 2622 - protein, 9 aa, Homo sapiens
AFPAHPIYD

SEQ ID NO: 2623 - protein, 9 aa, Homo sapiens
PVPHPDPPM

SEQ ID NO: 2624 - protein, 9 aa, Homo sapiens
PHPDPPMAL

SEQ ID NO: 2625 - protein, 9 aa, Homo sapiens
PEAHPNASL

SEQ ID NO: 2626 - protein, 9 aa, Homo sapiens
RGQALRRAR

SEQ ID NO: 2627 - protein, 9 aa, Homo sapiens
RQIGSIDTD

SEQ ID NO: 2628 - protein, 9 aa, Homo sapiens
QWEPVLVPE

SEQ ID NO: 2629 - protein, 9 aa, Homo sapiens
ASVPLLTHP

SEQ ID NO: 2630 - protein, 9 aa, Homo sapiens
FPQEAFPAH

SEQ ID NO: 2631 - protein, 9 aa, Homo sapiens
PTLGVVPQA

SEQ ID NO: 2632 - protein, 9 aa, Homo sapiens
EPVLVPEAH

SEQ ID NO: 2633 - protein, 9 aa, Homo sapiens
RLWGAPLQP

SEQ ID NO: 2634 - protein, 9 aa, Homo sapiens
WEPVLVPEA

SEQ ID NO: 2635 - protein, 9 aa, Homo sapiens
TDPPADGPS

SEQ ID NO: 2636 - protein, 9 aa, Homo sapiens
PLQPTLGVV

SEQ ID NO: 2637 - protein, 9 aa, Homo sapiens
SRLPPSLRC

SEQ ID NO: 2638 - protein, 9 aa, Homo sapiens
GPMPCSRLP

SEQ ID NO: 2639 - protein, 9 aa, Homo sapiens
LQPTLGVVP

SEQ ID NO: 2640 - protein, 9 aa, Homo sapiens
GVVPQASVP

SEQ ID NO: 2641 - protein, 9 aa, Homo sapiens
APVPHPDPP

SEQ ID NO: 2642 - protein, 9 aa, Homo sapiens
PIYDLSQVW

SEQ ID NO: 2643 - protein, 9 aa, Homo sapiens
VCAPVPHPD

SEQ ID NO: 2644 - protein, 9 aa, Homo sapiens
GPMPCSRLL

SEQ ID NO: 2645 - protein, 9 aa, Homo sapiens
LLPSLRCSL

SEQ ID NO: 2646 - protein, 9 aa, Homo sapiens
PCSRLLPSL

SEQ ID NO: 2647 - protein, 9 aa, Homo sapiens
RLLPSLRCS

SEQ ID NO: 2648 - protein, 9 aa, Homo sapiens
MPCSRLLPS

SEQ ID NO: 2649 - protein, 9 aa, Homo sapiens
SRLLPSLRC

SEQ ID NO: 2650 - protein, 9 aa, Homo sapiens
CSRLLPSLR

SEQ ID NO: 2651 - protein, 9 aa, Homo sapiens
LPSLRCSLH

SEQ ID NO: 2652 - protein, 9 aa, Homo sapiens
PMPCSRLLP

SEQ ID NO: 2653 - protein, 9 aa, Homo sapiens
SGDPASSRL

SEQ ID NO: 2654 - protein, 9 aa, Homo sapiens
SSRLWGAPL

SEQ ID NO: 2655 - protein, 9 aa, Homo sapiens
CCSGDPASS

SEQ ID NO: 2656 - protein, 9 aa, Homo sapiens
GDPASSRLW

SEQ ID NO: 2657 - protein, 9 aa, Homo sapiens
ASSRLWGAP

SEQ ID NO: 2658 - protein, 9 aa, Homo sapiens
CSGDPASSR

SEQ ID NO: 2659 - protein, 9 aa, Homo sapiens
PASSRLWGA

SEQ ID NO: 2660 - protein, 9 aa, Homo sapiens
DPASSRLWG

SEQ ID NO: 2661 - protein, 9 aa, Homo sapiens
SRLWGAPLQ

SEQ ID NO: 2662 - protein, 9 aa, Homo sapiens
DPAQWEPVL

SEQ ID NO: 2663 - protein, 9 aa, Homo sapiens
SVPLLTDPA

SEQ ID NO: 2664 - protein, 9 aa, Homo sapiens
ASVPLLTDP

SEQ ID NO: 2665 - protein, 9 aa, Homo sapiens
TDPAQWEPV

SEQ ID NO: 2666 - protein, 9 aa, Homo sapiens
PLLTDPAQW

SEQ ID NO: 2667 - protein, 9 aa, Homo sapiens
VPLLTDPAQ

SEQ ID NO: 2668 - protein, 9 aa, Homo sapiens
LLTDPAQWE

SEQ ID NO: 2669 - protein, 9 aa, Homo sapiens
LTDPAQWEP

SEQ ID NO: 2670 - protein, 9 aa, Homo sapiens
QASVPLLTD

SEQ ID NO: 2671 - protein, 9 aa, Homo sapiens
ASVPLLTDL

SEQ ID NO: 2672 - protein, 9 aa, Homo sapiens
DLAQWEPVL

SEQ ID NO: 2673 - protein, 9 aa, Homo sapiens
SVPLLTDLA

SEQ ID NO: 2674 - protein, 9 aa, Homo sapiens
LLTDLAQWE

SEQ ID NO: 2675 - protein, 9 aa, Homo sapiens
TDLAQWEPV

SEQ ID NO: 2676 - protein, 9 aa, Homo sapiens
VPLLTDLAQ

SEQ ID NO: 2677 - protein, 9 aa, Homo sapiens
PLLTDLAQW

SEQ ID NO: 2678 - protein, 9 aa, Homo sapiens
LTDLAQWEP

SEQ ID NO: 2679 - protein, 9 aa, Homo sapiens
ASVPLLTHL

SEQ ID NO: 2680 - protein, 9 aa, Homo sapiens
HLAQWEPVL

SEQ ID NO: 2681 - protein, 9 aa, Homo sapiens
SVPLLTHLA

SEQ ID NO: 2682 - protein, 9 aa, Homo sapiens
LAQWEPVLV

SEQ ID NO: 2683 - protein, 9 aa, Homo sapiens
VPLLTHLAQ

SEQ ID NO: 2684 - protein, 9 aa, Homo sapiens
PLLTHLAQW

SEQ ID NO: 2685 - protein, 9 aa, Homo sapiens
THLAQWEPV

SEQ ID NO: 2686 - protein, 9 aa, Homo sapiens
LLTHLAQWE

SEQ ID NO: 2687 - protein, 9 aa, Homo sapiens
LTHLAQWEP

SEQ ID NO: 2688 - protein, 9 aa, Homo sapiens
MYVCTPVPH

SEQ ID NO: 2689 - protein, 9 aa, Homo sapiens
LTMYVCTPV

SEQ ID NO: 2690 - protein, 9 aa, Homo sapiens
ASLTMYVCT

SEQ ID NO: 2691 - protein, 9 aa, Homo sapiens
VCTPVPHPD

SEQ ID NO: 2692 - protein, 9 aa, Homo sapiens
CTPVPHPDP

SEQ ID NO: 2693 - protein, 9 aa, Homo sapiens
TMYVCTPVP

SEQ ID NO: 2694 - protein, 9 aa, Homo sapiens
SLTMYVCTP

SEQ ID NO: 2695 - protein, 9 aa, Homo sapiens
YVCTPVPHP

SEQ ID NO: 2696 - protein, 9 aa, Homo sapiens
TPTRQISSI

SEQ ID NO: 2697 - protein, 9 aa, Homo sapiens
RTPTRQISS

SEQ ID NO: 2698 - protein, 9 aa, Homo sapiens
SSIDTDPPA

SEQ ID NO: 2699 - protein, 9 aa, Homo sapiens
RQISSIDTD

SEQ ID NO: 2700 - protein, 9 aa, Homo sapiens
TRQISSIDT

SEQ ID NO: 2701 - protein, 9 aa, Homo sapiens
SRTPTRQIS

SEQ ID NO: 2702 - protein, 9 aa, Homo sapiens
QISSIDTDP

SEQ ID NO: 2703 - protein, 9 aa, Homo sapiens
ISSIDTDPP

SEQ ID NO: 2704 - protein, 9 aa, Homo sapiens
PTRQISSID

SEQ ID NO: 2705 - protein, 8 aa, Homo sapiens
SSDTDPPA

SEQ ID NO: 2706 - protein, 9 aa, Homo sapiens
TPTRQISSS

SEQ ID NO: 2707 - protein, 9 aa, Homo sapiens
RQISSSDTD

SEQ ID NO: 2708 - protein, 9 aa, Homo sapiens
TRQISSSDT

SEQ ID NO: 2709 - protein, 9 aa, Homo sapiens
ISSSDTDPP

SEQ ID NO: 2710 - protein, 9 aa, Homo sapiens
QISSSDTDP

SEQ ID NO: 2711 - protein, 9 aa, Homo sapiens
PTRQISSSD

SEQ ID NO: 2712 - protein, 9 aa, Homo sapiens
GSSDTDPPA

SEQ ID NO: 2713 - protein, 9 aa, Homo sapiens
TPTRQIGSS

SEQ ID NO: 2714 - protein, 9 aa, Homo sapiens
RQIGSSDTD

SEQ ID NO: 2715 - protein, 9 aa, Homo sapiens
TRQIGSSDT

SEQ ID NO: 2716 - protein, 9 aa, Homo sapiens
SSDTDPPAD

SEQ ID NO: 2717 - protein, 9 aa, Homo sapiens
IGSSDTDPP

SEQ ID NO: 2718 - protein, 9 aa, Homo sapiens
QIGSSDTDP

SEQ ID NO: 2719 - protein, 9 aa, Homo sapiens
PTRQIGSSD

SEQ ID NO: 2720 - protein, 9 aa, Homo sapiens
SDTDPPADG

SEQ ID NO: 2721 - protein, 9 aa, Homo sapiens
RGQALRRAQ

SEQ ID NO: 2722 - protein, 9 aa, Homo sapiens
SRGQALRRA

SEQ ID NO: 2723 - protein, 10 aa, Homo sapiens
KNITCCDTDL

SEQ ID NO: 2724 - protein, 10 aa, Homo sapiens
KAQVSNEDCL

SEQ ID NO: 2725 - protein, 10 aa, Homo sapiens
ALLPALGLLL

SEQ ID NO: 2726 - protein, 10 aa, Homo sapiens
YYVGKKNITC

SEQ ID NO: 2727 - protein, 10 aa, Homo sapiens
VLLALLMAGL

SEQ ID NO: 2728 - protein, 10 aa, Homo sapiens
AAILALLPAL

SEQ ID NO: 2729 - protein, 10 aa, Homo sapiens
HALQPAAAIL

SEQ ID NO: 2730 - protein, 10 aa, Homo sapiens
DYYVGKKNIT

SEQ ID NO: 2731 - protein, 10 aa, Homo sapiens
LALLMAGLAL

SEQ ID NO: 2732 - protein, 10 aa, Homo sapiens
LCNASGAHAL

SEQ ID NO: 2733 - protein, 10 aa, Homo sapiens
CLQVENCTQL

SEQ ID NO: 2734 - protein, 10 aa, Homo sapiens
LQPAAAILAL

SEQ ID NO: 2735 - protein, 10 aa, Homo sapiens
LTVISKGCSL

SEQ ID NO: 2736 - protein, 10 aa, Homo sapiens
LALQPGTALL

SEQ ID NO: 2737 - protein, 10 aa, Homo sapiens
GLLLWGPGQL

SEQ ID NO: 2738 - protein, 10 aa, Homo sapiens
LALLPALGLL

SEQ ID NO: 2739 - protein, 10 aa, Homo sapiens
QPAAAILALL

SEQ ID NO: 2740 - protein, 10 aa, Homo sapiens
CYSCKAQVSN

SEQ ID NO: 2741 - protein, 10 aa, Homo sapiens
ILALLPALGL

SEQ ID NO: 2742 - protein, 10 aa, Homo sapiens
TARIRAVGLL

SEQ ID NO: 2743 - protein, 10 aa, Homo sapiens
WTARIRAVGL

SEQ ID NO: 2744 - protein, 10 aa, Homo sapiens
GLALQPGTAL

SEQ ID NO: 2745 - protein, 10 aa, Homo sapiens
LGEQCWTARI

SEQ ID NO: 2746 - protein, 10 aa, Homo sapiens
RAVGLLTVIS

SEQ ID NO: 2747 - protein, 10 aa, Homo sapiens
KAVLLALLMA

SEQ ID NO: 2748 - protein, 10 aa, Homo sapiens
SNEDCLQVEN

SEQ ID NO: 2749 - protein, 10 aa, Homo sapiens
GLLTVISKGC

SEQ ID NO: 2750 - protein, 10 aa, Homo sapiens
RIRAVGLLTV

SEQ ID NO: 2751 - protein, 10 aa, Homo sapiens
ALQPAAAILA

SEQ ID NO: 2752 - protein, 10 aa, Homo sapiens
NCVDDSQDYY

SEQ ID NO: 2753 - protein, 10 aa, Homo sapiens
ALQPGTALLC

SEQ ID NO: 2754 - protein, 10 aa, Homo sapiens
TALLCYSCKA

SEQ ID NO: 2755 - protein, 10 aa, Homo sapiens
SQDYYVGKKN

SEQ ID NO: 2756 - protein, 10 aa, Homo sapiens
LLPALGLLLW

SEQ ID NO: 2757 - protein, 10 aa, Homo sapiens
TVISKGCSLN

SEQ ID NO: 2758 - protein, 10 aa, Homo sapiens
LQPGTALLCY

SEQ ID NO: 2759 - protein, 10 aa, Homo sapiens
TQLGEQCWTA

SEQ ID NO: 2760 - protein, 10 aa, Homo sapiens
CTQLGEQCWT

SEQ ID NO: 2761 - protein, 10 aa, Homo sapiens
AGLALQPGTA

SEQ ID NO: 2762 - protein, 10 aa, Homo sapiens
CCDTDLCNAS

SEQ ID NO: 2763 - protein, 10 aa, Homo sapiens
TCCDTDLCNA

SEQ ID NO: 2764 - protein, 10 aa, Homo sapiens
ISKGCSLNCV

SEQ ID NO: 2765 - protein, 10 aa, Homo sapiens
CVDDSQDYYV

SEQ ID NO: 2766 - protein, 10 aa, Homo sapiens
ENCTQLGEQC

SEQ ID NO: 2767 - protein, 10 aa, Homo sapiens
LNCVDDSQDY

SEQ ID NO: 2768 - protein, 10 aa, Homo sapiens
NCTQLGEQCW

SEQ ID NO: 2769 - protein, 10 aa, Homo sapiens
IRAVGLLTVI

SEQ ID NO: 2770 - protein, 10 aa, Homo sapiens
ASGAHALQPA

SEQ ID NO: 2771 - protein, 10 aa, Homo sapiens
SGAHALQPAA

SEQ ID NO: 2772 - protein, 10 aa, Homo sapiens
LCYSCKAQVS

SEQ ID NO: 2773 - protein, 10 aa, Homo sapiens
QPGTALLCYS

SEQ ID NO: 2774 - protein, 10 aa, Homo sapiens
MAGLALQPGT

SEQ ID NO: 2775 - protein, 10 aa, Homo sapiens
QCWTARIRAV

SEQ ID NO: 2776 - protein, 10 aa, Homo sapiens
VISKGCSLNC

SEQ ID NO: 2777 - protein, 10 aa, Homo sapiens
AHALQPAAAI

SEQ ID NO: 2778 - protein, 10 aa, Homo sapiens
DTDLCNASGA

SEQ ID NO: 2779 - protein, 10 aa, Homo sapiens
YVGKKNITCC

SEQ ID NO: 2780 - protein, 10 aa, Homo sapiens
LLALLMAGLA

SEQ ID NO: 2781 - protein, 10 aa, Homo sapiens
QDYYVGKKNI

SEQ ID NO: 2782 - protein, 10 aa, Homo sapiens
ITCCDTDLCN

SEQ ID NO: 2783 - protein, 10 aa, Homo sapiens
NITCCDTDLC

SEQ ID NO: 2784 - protein, 10 aa, Homo sapiens
DLCNASGAHA

SEQ ID NO: 2785 - protein, 10 aa, Homo sapiens
LLTVISKGCS

SEQ ID NO: 2786 - protein, 10 aa, Homo sapiens
GCSLNCVDDS

SEQ ID NO: 2787 - protein, 10 aa, Homo sapiens
AAAILALLPA

SEQ ID NO: 2788 - protein, 10 aa, Homo sapiens
LLCYSCKAQV

SEQ ID NO: 2789 - protein, 10 aa, Homo sapiens
EQCWTARIRA

SEQ ID NO: 2790 - protein, 10 aa, Homo sapiens
GAHALQPAAA

SEQ ID NO: 2791 - protein, 10 aa, Homo sapiens
QVSNEDCLQV

SEQ ID NO: 2792 - protein, 10 aa, Homo sapiens
MKAVLLALLM

SEQ ID NO: 2793 - protein, 10 aa, Homo sapiens
VGLLTVISKG

SEQ ID NO: 2794 - protein, 10 aa, Homo sapiens
LQVENCTQLG

SEQ ID NO: 2795 - protein, 10 aa, Homo sapiens
VSNEDCLQVE

SEQ ID NO: 2796 - protein, 10 aa, Homo sapiens
ARIRAVGLLT

SEQ ID NO: 2797 - protein, 10 aa, Homo sapiens
CSLNCVDDSQ

SEQ ID NO: 2798 - protein, 10 aa, Homo sapiens
KGCSLNCVDD

SEQ ID NO: 2799 - protein, 10 aa, Homo sapiens
DSQDYYVGKK

SEQ ID NO: 2800 - protein, 10 aa, Homo sapiens
SCKAQVSNED

SEQ ID NO: 2801 - protein, 10 aa, Homo sapiens
LLMAGLALQP

SEQ ID NO: 2802 - protein, 10 aa, Homo sapiens
AVLLALLMAG

SEQ ID NO: 2803 - protein, 10 aa, Homo sapiens
AILALLPALG

SEQ ID NO: 2804 - protein, 10 aa, Homo sapiens
EDCLQVENCT

SEQ ID NO: 2805 - protein, 10 aa, Homo sapiens
ALLCYSCKAQ

SEQ ID NO: 2806 - protein, 10 aa, Homo sapiens
AQVSNEDCLQ

SEQ ID NO: 2807 - protein, 10 aa, Homo sapiens
SLNCVDDSQD

SEQ ID NO: 2808 - protein, 10 aa, Homo sapiens
LGLLLWGPGQ

SEQ ID NO: 2809 - protein, 10 aa, Homo sapiens
DCLQVENCTQ

SEQ ID NO: 2810 - protein, 10 aa, Homo sapiens
QVENCTQLGE

SEQ ID NO: 2811 - protein, 10 aa, Homo sapiens
ALLMAGLALQ

SEQ ID NO: 2812 - protein, 10 aa, Homo sapiens
CWTARIRAVG

SEQ ID NO: 2813 - protein, 10 aa, Homo sapiens
VGKKNITCCD

SEQ ID NO: 2814 - protein, 10 aa, Homo sapiens
ALGLLLWGPG

SEQ ID NO: 2815 - protein, 10 aa, Homo sapiens
PGTALLCYSC

SEQ ID NO: 2816 - protein, 10 aa, Homo sapiens
QLGEQCWTAR

SEQ ID NO: 2817 - protein, 10 aa, Homo sapiens
LMAGLALQPG

SEQ ID NO: 2818 - protein, 10 aa, Homo sapiens
LPALGLLLWG

SEQ ID NO: 2819 - protein, 10 aa, Homo sapiens
NEDCLQVENC

SEQ ID NO: 2820 - protein, 10 aa, Homo sapiens
NASGAHALQP

SEQ ID NO: 2821 - protein, 10 aa, Homo sapiens
CNASGAHALQ

SEQ ID NO: 2822 - protein, 10 aa, Homo sapiens
GKKNITCCDT

SEQ ID NO: 2823 - protein, 10 aa, Homo sapiens
AFPAHPIYDL

SEQ ID NO: 2824 - protein, 10 aa, Homo sapiens
CFHGPAFSTL

SEQ ID NO: 2825 - protein, 10 aa, Homo sapiens
RLPPSLRCSL

SEQ ID NO: 2826 - protein, 10 aa, Homo sapiens
STLNPVLRHL

SEQ ID NO: 2827 - protein, 10 aa, Homo sapiens
GVVPQASVPL

SEQ ID NO: 2828 - protein, 10 aa, Homo sapiens
VPEAHPNASL

SEQ ID NO: 2829 - protein, 10 aa, Homo sapiens
VVPQASVPLL

SEQ ID NO: 2830 - protein, 10 aa, Homo sapiens
SPAPSRGQAL

SEQ ID NO: 2831 - protein, 10 aa, Homo sapiens
IYDLSQVWSV

SEQ ID NO: 2832 - protein, 10 aa, Homo sapiens
VPHPDPPMAL

SEQ ID NO: 2833 - protein, 10 aa, Homo sapiens
MPCSRLPPSL

SEQ ID NO: 2834 - protein, 10 aa, Homo sapiens
CSGDPASYRL

SEQ ID NO: 2835 - protein, 10 aa, Homo sapiens
LWGAPLQPTL

SEQ ID NO: 2836 - protein, 10 aa, Homo sapiens
TLNPVLRHLF

SEQ ID NO: 2837 - protein, 10 aa, Homo sapiens
ASYRLWGAPL

SEQ ID NO: 2838 - protein, 10 aa, Homo sapiens
RTPTRQIGSI

SEQ ID NO: 2839 - protein, 10 aa, Homo sapiens
GPSNPLCCCF

SEQ ID NO: 2840 - protein, 10 aa, Homo sapiens
LCCCFHGPAF

SEQ ID NO: 2841 - protein, 10 aa, Homo sapiens
ALSRTPTRQI

SEQ ID NO: 2842 - protein, 10 aa, Homo sapiens
APVPHPDPPM

SEQ ID NO: 2843 - protein, 10 aa, Homo sapiens
MYVCAPVPHP

SEQ ID NO: 2844 - protein, 10 aa, Homo sapiens
THPAQWEPVL

SEQ ID NO: 2845 - protein, 10 aa, Homo sapiens
EAHPNASLTM

SEQ ID NO: 2846 - protein, 10 aa, Homo sapiens
PPADGPSNPL

SEQ ID NO: 2847 - protein, 10 aa, Homo sapiens
SYRLWGAPLQ

SEQ ID NO: 2848 - protein, 10 aa, Homo sapiens
PAFSTLNPVL

SEQ ID NO: 2849 - protein, 10 aa, Homo sapiens
PAGPMPCSRL

SEQ ID NO: 2850 - protein, 10 aa, Homo sapiens
RTSRAVTPTC

SEQ ID NO: 2851 - protein, 10 aa, Homo sapiens
RLWGAPLQPT

SEQ ID NO: 2852 - protein, 10 aa, Homo sapiens
QWEPVLVPEA

SEQ ID NO: 2853 - protein, 10 aa, Homo sapiens
LVPEAHPNAS

SEQ ID NO: 2854 - protein, 10 aa, Homo sapiens
ASVPLLTHPA

SEQ ID NO: 2855 - protein, 10 aa, Homo sapiens
HPIYDLSQVW

SEQ ID NO: 2856 - protein, 10 aa, Homo sapiens
VPQASVPLLT

SEQ ID NO: 2857 - protein, 10 aa, Homo sapiens
SQVWSVVSPA

SEQ ID NO: 2858 - protein, 10 aa, Homo sapiens
RTTTWARRTS

SEQ ID NO: 2859 - protein, 10 aa, Homo sapiens
RCSLHSACCS

SEQ ID NO: 2860 - protein, 10 aa, Homo sapiens
LRHLFPQEAF

SEQ ID NO: 2861 - protein, 10 aa, Homo sapiens
VLVPEAHPNA

SEQ ID NO: 2862 - protein, 10 aa, Homo sapiens
HPNASLTMYV

SEQ ID NO: 2863 - protein, 10 aa, Homo sapiens
VPLLTHPAQW

SEQ ID NO: 2864 - protein, 10 aa, Homo sapiens
GAPLQPTLGV

SEQ ID NO: 2865 - protein, 10 aa, Homo sapiens
PQEAFPAHPI

SEQ ID NO: 2866 - protein, 10 aa, Homo sapiens
APLQPTLGVV

SEQ ID NO: 2867 - protein, 10 aa, Homo sapiens
DGPSNPLCCC

SEQ ID NO: 2868 - protein, 10 aa, Homo sapiens
ATPAGPMPCS

SEQ ID NO: 2869 - protein, 10 aa, Homo sapiens
VSPAPSRGQA

SEQ ID NO: 2870 - protein, 10 aa, Homo sapiens
QPTLGVVPQA

SEQ ID NO: 2871 - protein, 10 aa, Homo sapiens
SLTMYVCAPV

SEQ ID NO: 2872 - protein, 10 aa, Homo sapiens
FPAHPIYDLS

SEQ ID NO: 2873 - protein, 10 aa, Homo sapiens
VLRHLFPQEA

SEQ ID NO: 2874 - protein, 10 aa, Homo sapiens
SGDPASYRLW

SEQ ID NO: 2875 - protein, 10 aa, Homo sapiens
DTDPPADGPS

SEQ ID NO: 2876 - protein, 10 aa, Homo sapiens
SLRCSLHSAC

SEQ ID NO: 2877 - protein, 10 aa, Homo sapiens
AVTPTCATPA

SEQ ID NO: 2878 - protein, 10 aa, Homo sapiens
CATPAGPMPC

SEQ ID NO: 2879 - protein, 10 aa, Homo sapiens
GPAFSTLNPV

SEQ ID NO: 2880 - protein, 10 aa, Homo sapiens
LTHPAQWEPV

SEQ ID NO: 2881 - protein, 10 aa, Homo sapiens
HLFPQEAFPA

SEQ ID NO: 2882 - protein, 10 aa, Homo sapiens
WARRTSRAVT

SEQ ID NO: 2883 - protein, 10 aa, Homo sapiens
CCCFHGPAFS

SEQ ID NO: 2884 - protein, 10 aa, Homo sapiens
SACCSGDPAS

SEQ ID NO: 2885 - protein, 10 aa, Homo sapiens
VWSVVSPAPS

SEQ ID NO: 2886 - protein, 10 aa, Homo sapiens
HPAQWEPVLV

SEQ ID NO: 2887 - protein, 10 aa, Homo sapiens
TTWARRTSRA

SEQ ID NO: 2888 - protein, 10 aa, Homo sapiens
DLSQVWSVVS

SEQ ID NO: 2889 - protein, 10 aa, Homo sapiens
CSRLPPSLRC

SEQ ID NO: 2890 - protein, 10 aa, Homo sapiens
HSACCSGDPA

SEQ ID NO: 2891 - protein, 10 aa, Homo sapiens
DPASYRLWGA

SEQ ID NO: 2892 - protein, 10 aa, Homo sapiens
IGSIDTDPPA

SEQ ID NO: 2893 - protein, 10 aa, Homo sapiens
ACCSGDPASY

SEQ ID NO: 2894 - protein, 10 aa, Homo sapiens
TLGVVPQASV

SEQ ID NO: 2895 - protein, 10 aa, Homo sapiens
CCFHGPAFST

SEQ ID NO: 2896 - protein, 10 aa, Homo sapiens
TSRAVTPTCA

SEQ ID NO: 2897 - protein, 10 aa, Homo sapiens
NASLTMYVCA

SEQ ID NO: 2898 - protein, 10 aa, Homo sapiens
TWARRTSRAV

SEQ ID NO: 2899 - protein, 10 aa, Homo sapiens
LFPQEAFPAH

SEQ ID NO: 2900 - protein, 10 aa, Homo sapiens
PTCATPAGPM

SEQ ID NO: 2901 - protein, 10 aa, Homo sapiens
AFSTLNPVLR

SEQ ID NO: 2902 - protein, 10 aa, Homo sapiens
RQIGSIDTDP

SEQ ID NO: 2903 - protein, 10 aa, Homo sapiens
RAVTPTCATP

SEQ ID NO: 2904 - protein, 10 aa, Homo sapiens
PTLGVVPQAS

SEQ ID NO: 2905 - protein, 10 aa, Homo sapiens
YDLSQVWSVV

SEQ ID NO: 2906 - protein, 10 aa, Homo sapiens
RRTSRAVTPT

SEQ ID NO: 2907 - protein, 10 aa, Homo sapiens
TDPPADGPSN

SEQ ID NO: 2908 - protein, 10 aa, Homo sapiens
SRLPPSLRCS

SEQ ID NO: 2909 - protein, 10 aa, Homo sapiens
GPMPCSRLPP

SEQ ID NO: 2910 - protein, 10 aa, Homo sapiens
FPQEAFPAHP

SEQ ID NO: 2911 - protein, 10 aa, Homo sapiens
DPPMALSRTP

SEQ ID NO: 2912 - protein, 10 aa, Homo sapiens
NPLCCCFHGP

SEQ ID NO: 2913 - protein, 10 aa, Homo sapiens
GSIDTDPPAD

SEQ ID NO: 2914 - protein, 10 aa, Homo sapiens
AQWEPVLVPE

SEQ ID NO: 2915 - protein, 10 aa, Homo sapiens
PVPHPDPPMA

SEQ ID NO: 2916 - protein, 10 aa, Homo sapiens
AGPMPCSRLP

SEQ ID NO: 2917 - protein, 10 aa, Homo sapiens
LTMYVCAPVP

SEQ ID NO: 2918 - protein, 10 aa, Homo sapiens
CAPVPHPDPP

SEQ ID NO: 2919 - protein, 10 aa, Homo sapiens
HGPAFSTLNP

SEQ ID NO: 2920 - protein, 10 aa, Homo sapiens
PSLRCSLHSA

SEQ ID NO: 2921 - protein, 10 aa, Homo sapiens
PPMALSRTPT

SEQ ID NO: 2922 - protein, 10 aa, Homo sapiens
LNPVLRHLFP

SEQ ID NO: 2923 - protein, 10 aa, Homo sapiens
RLLPSLRCSL

SEQ ID NO: 2924 - protein, 10 aa, Homo sapiens
AGPMPCSRLL

SEQ ID NO: 2925 - protein, 10 aa, Homo sapiens
MPCSRLLPSL

SEQ ID NO: 2926 - protein, 10 aa, Homo sapiens
CSRLLPSLRC

SEQ ID NO: 2927 - protein, 10 aa, Homo sapiens
LPSLRCSLHS

SEQ ID NO: 2928 - protein, 10 aa, Homo sapiens
GPMPCSRLLP

SEQ ID NO: 2929 - protein, 10 aa, Homo sapiens
SRLLPSLRCS

SEQ ID NO: 2930 - protein, 10 aa, Homo sapiens
PMPCSRLLPS

SEQ ID NO: 2931 - protein, 10 aa, Homo sapiens
LLPSLRCSLH

SEQ ID NO: 2932 - protein, 10 aa, Homo sapiens
PCSRLLPSLR

SEQ ID NO: 2933 - protein, 10 aa, Homo sapiens
CSGDPASSRL

SEQ ID NO: 2934 - protein, 10 aa, Homo sapiens
ASSRLWGAPL

SEQ ID NO: 2935 - protein, 10 aa, Homo sapiens
SGDPASSRLW

SEQ ID NO: 2936 - protein, 10 aa, Homo sapiens
DPASSRLWGA

SEQ ID NO: 2937 - protein, 10 aa, Homo sapiens
ACCSGDPASS

SEQ ID NO: 2938 - protein, 10 aa, Homo sapiens
SSRLWGAPLQ

SEQ ID NO: 2939 - protein, 10 aa, Homo sapiens
CCSGDPASSR

SEQ ID NO: 2940 - protein, 10 aa, Homo sapiens
SRLWGAPLQP

SEQ ID NO: 2941 - protein, 10 aa, Homo sapiens
GDPASSRLWG

SEQ ID NO: 2942 - protein, 10 aa, Homo sapiens
PASSRLWGAP

SEQ ID NO: 2943 - protein, 10 aa, Homo sapiens
TDPAQWEPVL

SEQ ID NO: 2944 - protein, 10 aa, Homo sapiens
ASVPLLTDPA

SEQ ID NO: 2945 - protein, 10 aa, Homo sapiens
VPLLTDPAQW

SEQ ID NO: 2946 - protein, 10 aa, Homo sapiens
LTDPAQWEPV

SEQ ID NO: 2947 - protein, 10 aa, Homo sapiens
DPAQWEPVLV

SEQ ID NO: 2948 - protein, 10 aa, Homo sapiens
SVPLLTDPAQ

SEQ ID NO: 2949 - protein, 10 aa, Homo sapiens
LLTDPAQWEP

SEQ ID NO: 2950 - protein, 10 aa, Homo sapiens
QASVPLLTDP

SEQ ID NO: 2951 - protein, 10 aa, Homo sapiens
PLLTDPAQWE

SEQ ID NO: 2952 - protein, 10 aa, Homo sapiens
PQASVPLLTD

SEQ ID NO: 2953 - protein, 10 aa, Homo sapiens
QASVPLLTDL

SEQ ID NO: 2954 - protein, 10 aa, Homo sapiens
TDLAQWEPVL

SEQ ID NO: 2955 - protein, 10 aa, Homo sapiens
ASVPLLTDLA

SEQ ID NO: 2956 - protein, 10 aa, Homo sapiens
VPLLTDLAQW

SEQ ID NO: 2957 - protein, 10 aa, Homo sapiens
LTDLAQWEPV

SEQ ID NO: 2958 - protein, 10 aa, Homo sapiens
DLAQWEPVLV

SEQ ID NO: 2959 - protein, 10 aa, Homo sapiens
SVPLLTDLAQ

SEQ ID NO: 2960 - protein, 10 aa, Homo sapiens
LLTDLAQWEP

SEQ ID NO: 2961 - protein, 10 aa, Homo sapiens
PLLTDLAQWE

SEQ ID NO: 2962 - protein, 10 aa, Homo sapiens
QASVPLLTHL

SEQ ID NO: 2963 - protein, 10 aa, Homo sapiens
THLAQWEPVL

SEQ ID NO: 2964 - protein, 10 aa, Homo sapiens
ASVPLLTHLA

SEQ ID NO: 2965 - protein, 10 aa, Homo sapiens
VPLLTHLAQW

SEQ ID NO: 2966 - protein, 10 aa, Homo sapiens
LTHLAQWEPV

SEQ ID NO: 2967 - protein, 10 aa, Homo sapiens
HLAQWEPVLV

SEQ ID NO: 2968 - protein, 10 aa, Homo sapiens
LAQWEPVLVP

SEQ ID NO: 2969 - protein, 10 aa, Homo sapiens
SVPLLTHLAQ

SEQ ID NO: 2970 - protein, 10 aa, Homo sapiens
LLTHLAQWEP

SEQ ID NO: 2971 - protein, 10 aa, Homo sapiens
PLLTHLAQWE

SEQ ID NO: 2972 - protein, 10 aa, Homo sapiens
TPVPHPDPPM

SEQ ID NO: 2973 - protein, 10 aa, Homo sapiens
MYVCTPVPHP

SEQ ID NO: 2974 - protein, 10 aa, Homo sapiens
SLTMYVCTPV

SEQ ID NO: 2975 - protein, 10 aa, Homo sapiens
NASLTMYVCT

SEQ ID NO: 2976 - protein, 10 aa, Homo sapiens
CTPVPHPDPP

SEQ ID NO: 2977 - protein, 10 aa, Homo sapiens
LTMYVCTPVP

SEQ ID NO: 2978 - protein, 10 aa, Homo sapiens
ASLTMYVCTP

SEQ ID NO: 2979 - protein, 10 aa, Homo sapiens
YVCTPVPHPD

SEQ ID NO: 2980 - protein, 10 aa, Homo sapiens
VCTPVPHPDP

SEQ ID NO: 2981 - protein, 10 aa, Homo sapiens
TMYVCTPVPH

SEQ ID NO: 2982 - protein, 10 aa, Homo sapiens
RTPTRQISSI

SEQ ID NO: 2983 - protein, 10 aa, Homo sapiens
LSRTPTRQIS

SEQ ID NO: 2984 - protein, 10 aa, Homo sapiens
ISSIDTDPPA

SEQ ID NO: 2985 - protein, 10 aa, Homo sapiens
RQISSIDTDP

SEQ ID NO: 2986 - protein, 10 aa, Homo sapiens
SSIDTDPPAD

SEQ ID NO: 2987 - protein, 10 aa, Homo sapiens
TPTRQISSID

SEQ ID NO: 2988 - protein, 10 aa, Homo sapiens
SRTPTRQISS

SEQ ID NO: 2989 - protein, 10 aa, Homo sapiens
QISSIDTDPP

SEQ ID NO: 2990 - protein, 10 aa, Homo sapiens
PTRQISSIDT

SEQ ID NO: 2991 - protein, 10 aa, Homo sapiens
TRQISSIDTD

SEQ ID NO: 2992 - protein, 10 aa, Homo sapiens
RTPTRQISSS

SEQ ID NO: 2993 - protein, 10 aa, Homo sapiens
ISSSDTDPPA

SEQ ID NO: 2994 - protein, 10 aa, Homo sapiens
RQISSSDTDP

SEQ ID NO: 2995 - protein, 10 aa, Homo sapiens
TPTRQISSSD

SEQ ID NO: 2996 - protein, 10 aa, Homo sapiens
SSSDTDPPAD

SEQ ID NO: 2997 - protein, 10 aa, Homo sapiens
QISSSDTDPP

SEQ ID NO: 2998 - protein, 10 aa, Homo sapiens
PTRQISSSDT

SEQ ID NO: 2999 - protein, 10 aa, Homo sapiens
TRQISSSDTD

SEQ ID NO: 3000 - protein, 10 aa, Homo sapiens
PSRGQALRRA

SEQ ID NO: 3001 - protein, 10 aa, Homo sapiens
SRGQALRRAQ

SEQ ID NO: 3002 - protein, 9 aa, Homo sapiens
TARIRAVGL

SEQ ID NO: 3003 - protein, 9 aa, Homo sapiens
QPAAAILAL

SEQ ID NO: 3004 - protein, 9 aa, Homo sapiens
TVISKGCSL

SEQ ID NO: 3005 - protein, 9 aa, Homo sapiens
LALQPGTAL

SEQ ID NO: 3006 - protein, 9 aa, Homo sapiens
LALLPALGL

SEQ ID NO: 3007 - protein, 9 aa, Homo sapiens
AQVSNEDCL

SEQ ID NO: 3008 - protein, 9 aa, Homo sapiens
AILALLPAL

SEQ ID NO: 3009 - protein, 9 aa, Homo sapiens
ALLPALGLL

SEQ ID NO: 3010 - protein, 9 aa, Homo sapiens
ALQPAAAIL

SEQ ID NO: 3011 - protein, 9 aa, Homo sapiens
ALLMAGLAL

SEQ ID NO: 3012 - protein, 9 aa, Homo sapiens
ALQPGTALL

SEQ ID NO: 3013 - protein, 9 aa, Homo sapiens
CNASGAHAL

SEQ ID NO: 3014 - protein, 9 aa, Homo sapiens
LQVENCTQL

SEQ ID NO: 3015 - protein, 9 aa, Homo sapiens
NITCCDTDL

SEQ ID NO: 3016 - protein, 9 aa, Homo sapiens
LLPALGLLL

SEQ ID NO: 3017 - protein, 9 aa, Homo sapiens
LLALLMAGL

SEQ ID NO: 3018 - protein, 9 aa, Homo sapiens
LLLWGPGQL

SEQ ID NO: 3019 - protein, 9 aa, Homo sapiens
KAVLLALLM

SEQ ID NO: 3020 - protein, 9 aa, Homo sapiens
HALQPAAAI

SEQ ID NO: 3021 - protein, 9 aa, Homo sapiens
AVLLALLMA

SEQ ID NO: 3022 - protein, 9 aa, Homo sapiens
PAAAILALL

SEQ ID NO: 3023 - protein, 9 aa, Homo sapiens
RAVGLLTVI

SEQ ID NO: 3024 - protein, 9 aa, Homo sapiens
ARIRAVGLL

SEQ ID NO: 3025 - protein, 9 aa, Homo sapiens
RIRAVGLLT

SEQ ID NO: 3026 - protein, 9 aa, Homo sapiens
AAILALLPA

SEQ ID NO: 3027 - protein, 9 aa, Homo sapiens
YVGKKNITC

SEQ ID NO: 3028 - protein, 9 aa, Homo sapiens
QPGTALLCY

SEQ ID NO: 3029 - protein, 9 aa, Homo sapiens
LPALGLLLW

SEQ ID NO: 3030 - protein, 9 aa, Homo sapiens
MKAVLLALL

SEQ ID NO: 3031 - protein, 9 aa, Homo sapiens
AVGLLTVIS

SEQ ID NO: 3032 - protein, 9 aa, Homo sapiens
GAHALQPAA

SEQ ID NO: 3033 - protein, 9 aa, Homo sapiens
AGLALQPGT

SEQ ID NO: 3034 - protein, 9 aa, Homo sapiens
ALLCYSCKA

SEQ ID NO: 3035 - protein, 9 aa, Homo sapiens
LALLMAGLA

SEQ ID NO: 3036 - protein, 9 aa, Homo sapiens
KAQVSNEDC

SEQ ID NO: 3037 - protein, 9 aa, Homo sapiens
LCYSCKAQV

SEQ ID NO: 3038 - protein, 9 aa, Homo sapiens
VSNEDCLQV

SEQ ID NO: 3039 - protein, 9 aa, Homo sapiens
QCWTARIRA

SEQ ID NO: 3040 - protein, 9 aa, Homo sapiens
DCLQVENCT

SEQ ID NO: 3041 - protein, 9 aa, Homo sapiens
GTALLCYSC

SEQ ID NO: 3042 - protein, 9 aa, Homo sapiens
LQPGTALLC

SEQ ID NO: 3043 - protein, 9 aa, Homo sapiens
ISKGCSLNC

SEQ ID NO: 3044 - protein, 9 aa, Homo sapiens
SGAHALQPA

SEQ ID NO: 3045 - protein, 9 aa, Homo sapiens
VGKKNITCC

SEQ ID NO: 3046 - protein, 9 aa, Homo sapiens
NCTQLGEQC

SEQ ID NO: 3047 - protein, 9 aa, Homo sapiens
QLGEQCWTA

SEQ ID NO: 3048 - protein, 9 aa, Homo sapiens
LQPAAAILA

SEQ ID NO: 3049 - protein, 9 aa, Homo sapiens
ITCCDTDLC

SEQ ID NO: 3050 - protein, 9 aa, Homo sapiens
LCNASGAHA

SEQ ID NO: 3051 - protein, 9 aa, Homo sapiens
TQLGEQCWT

SEQ ID NO: 3052 - protein, 9 aa, Homo sapiens
GLALQPGTA

SEQ ID NO: 3053 - protein, 9 aa, Homo sapiens
LLTVISKGC

SEQ ID NO: 3054 - protein, 9 aa, Homo sapiens
AAAILALLP

SEQ ID NO: 3055 - protein, 9 aa, Homo sapiens
QVSNEDCLQ

SEQ ID NO: 3056 - protein, 9 aa, Homo sapiens
GEQCWTARI

SEQ ID NO: 3057 - protein, 9 aa, Homo sapiens
DYYVGKKNI

SEQ ID NO: 3058 - protein, 9 aa, Homo sapiens
ASGAHALQP

SEQ ID NO: 3059 - protein, 9 aa, Homo sapiens
ALGLLLWGP

SEQ ID NO: 3060 - protein, 9 aa, Homo sapiens
AHALQPAAA

SEQ ID NO: 3061 - protein, 9 aa, Homo sapiens
CVDDSQDYY

SEQ ID NO: 3062 - protein, 9 aa, Homo sapiens
LLMAGLALQ

SEQ ID NO: 3063 - protein, 9 aa, Homo sapiens
MAGLALQPG

SEQ ID NO: 3064 - protein, 9 aa, Homo sapiens
NASGAHALQ

SEQ ID NO: 3065 - protein, 9 aa, Homo sapiens
TALLCYSCK

SEQ ID NO: 3066 - protein, 9 aa, Homo sapiens
CCDTDLCNA

SEQ ID NO: 3067 - protein, 9 aa, Homo sapiens
NCVDDSQDY

SEQ ID NO: 3068 - protein, 9 aa, Homo sapiens
SKGCSLNCV

SEQ ID NO: 3069 - protein, 9 aa, Homo sapiens
CTQLGEQCW

SEQ ID NO: 3070 - protein, 9 aa, Homo sapiens
LTVISKGCS

SEQ ID NO: 3071 - protein, 9 aa, Homo sapiens
TCCDTDLCN

SEQ ID NO: 3072 - protein, 9 aa, Homo sapiens
VISKGCSLN

SEQ ID NO: 3073 - protein, 9 aa, Homo sapiens
CSLNCVDDS

SEQ ID NO: 3074 - protein, 9 aa, Homo sapiens
IRAVGLLTV

SEQ ID NO: 3075 - protein, 9 aa, Homo sapiens
CWTARIRAV

SEQ ID NO: 3076 - protein, 9 aa, Homo sapiens
YSCKAQVSN

SEQ ID NO: 3077 - protein, 9 aa, Homo sapiens
QVENCTQLG

SEQ ID NO: 3078 - protein, 9 aa, Homo sapiens
WTARIRAVG

SEQ ID NO: 3079 - protein, 9 aa, Homo sapiens
EDCLQVENC

SEQ ID NO: 3080 - protein, 9 aa, Homo sapiens
EQCWTARIR

SEQ ID NO: 3081 - protein, 9 aa, Homo sapiens
KGCSLNCVD

SEQ ID NO: 3082 - protein, 9 aa, Homo sapiens
GCSLNCVDD

SEQ ID NO: 3083 - protein, 9 aa, Homo sapiens
LGLLLWGPG

SEQ ID NO: 3084 - protein, 9 aa, Homo sapiens
GLLTVISKG

SEQ ID NO: 3085 - protein, 9 aa, Homo sapiens
CLQVENCTQ

SEQ ID NO: 3086 - protein, 9 aa, Homo sapiens
LLCYSCKAQ

SEQ ID NO: 3087 - protein, 9 aa, Homo sapiens
SLNCVDDSQ

SEQ ID NO: 3088 - protein, 9 aa, Homo sapiens
DLCNASGAH

SEQ ID NO: 3089 - protein, 9 aa, Homo sapiens
KKNITCCDT

SEQ ID NO: 3090 - protein, 9 aa, Homo sapiens
ENCTQLGEQ

SEQ ID NO: 3091 - protein, 9 aa, Homo sapiens
GLLLWGPGQ

SEQ ID NO: 3092 - protein, 9 aa, Homo sapiens
DSQDYYVGK

SEQ ID NO: 3093 - protein, 9 aa, Homo sapiens
LMAGLALQP

SEQ ID NO: 3094 - protein, 9 aa, Homo sapiens
SCKAQVSNE

SEQ ID NO: 3095 - protein, 9 aa, Homo sapiens
LNCVDDSQD

SEQ ID NO: 3096 - protein, 9 aa, Homo sapiens
ILALLPALG

SEQ ID NO: 3097 - protein, 9 aa, Homo sapiens
TDLCNASGA

SEQ ID NO: 3098 - protein, 9 aa, Homo sapiens
YYVGKKNIT

SEQ ID NO: 3099 - protein, 9 aa, Homo sapiens
VLLALLMAG

SEQ ID NO: 3100 - protein, 9 aa, Homo sapiens
VGLLTVISK

SEQ ID NO: 3101 - protein, 9 aa, Homo sapiens
KNITCCDTD

SEQ ID NO: 3102 - protein, 9 aa, Homo sapiens
LPPSLRCSL

SEQ ID NO: 3103 - protein, 9 aa, Homo sapiens
FPAHPIYDL

SEQ ID NO: 3104 - protein, 9 aa, Homo sapiens
VPQASVPLL

SEQ ID NO: 3105 - protein, 9 aa, Homo sapiens
HPAQWEPVL

SEQ ID NO: 3106 - protein, 9 aa, Homo sapiens
VVPQASVPL

SEQ ID NO: 3107 - protein, 9 aa, Homo sapiens
APLQPTLGV

SEQ ID NO: 3108 - protein, 9 aa, Homo sapiens
AGPMPCSRL

SEQ ID NO: 3109 - protein, 9 aa, Homo sapiens
TPTRQIGSI

SEQ ID NO: 3110 - protein, 9 aa, Homo sapiens
LSRTPTRQI

SEQ ID NO: 3111 - protein, 9 aa, Homo sapiens
WARRTSRAV

SEQ ID NO: 3112 - protein, 9 aa, Homo sapiens
HPIYDLSQV

SEQ ID NO: 3113 - protein, 9 aa, Homo sapiens
TLNPVLRHL

SEQ ID NO: 3114 - protein, 9 aa, Homo sapiens
SYRLWGAPL

SEQ ID NO: 3115 - protein, 9 aa, Homo sapiens
WGAPLQPTL

SEQ ID NO: 3116 - protein, 9 aa, Homo sapiens
GPSNPLCCC

SEQ ID NO: 3117 - protein, 9 aa, Homo sapiens
SPAPSRGQA

SEQ ID NO: 3118 - protein, 9 aa, Homo sapiens
VPHPDPPMA

SEQ ID NO: 3119 - protein, 9 aa, Homo sapiens
DPPMALSRT

SEQ ID NO: 3120 - protein, 9 aa, Homo sapiens
TCATPAGPM

SEQ ID NO: 3121 - protein, 9 aa, Homo sapiens
PAPSRGQAL

SEQ ID NO: 3122 - protein, 9 aa, Homo sapiens
SGDPASYRL

SEQ ID NO: 3123 - protein, 9 aa, Homo sapiens
AFSTLNPVL

SEQ ID NO: 3124 - protein, 9 aa, Homo sapiens
TSRAVTPTC

SEQ ID NO: 3125 - protein, 9 aa, Homo sapiens
SLRCSLHSA

SEQ ID NO: 3126 - protein, 9 aa, Homo sapiens
PVPHPDPPM

SEQ ID NO: 3127 - protein, 9 aa, Homo sapiens
GPMPCSRLP

SEQ ID NO: 3128 - protein, 9 aa, Homo sapiens
TPAGPMPCS

SEQ ID NO: 3129 - protein, 9 aa, Homo sapiens
LTMYVCAPV

SEQ ID NO: 3130 - protein, 9 aa, Homo sapiens
APSRGQALR

SEQ ID NO: 3131 - protein, 9 aa, Homo sapiens
APVPHPDPP

SEQ ID NO: 3132 - protein, 9 aa, Homo sapiens
PADGPSNPL

SEQ ID NO: 3133 - protein, 9 aa, Homo sapiens
LVPEAHPNA

SEQ ID NO: 3134 - protein, 9 aa, Homo sapiens
QVWSVVSPA

SEQ ID NO: 3135 - protein, 9 aa, Homo sapiens
SVPLLTHPA

SEQ ID NO: 3136 - protein, 9 aa, Homo sapiens
ARRTSRAVT

SEQ ID NO: 3137 - protein, 9 aa, Homo sapiens
RAVTPTCAT

SEQ ID NO: 3138 - protein, 9 aa, Homo sapiens
PCSRLPPSL

SEQ ID NO: 3139 - protein, 9 aa, Homo sapiens
HPNASLTMY

SEQ ID NO: 3140 - protein, 9 aa, Homo sapiens
DPPADGPSN

SEQ ID NO: 3141 - protein, 9 aa, Homo sapiens
MPCSRLPPS

SEQ ID NO: 3142 - protein, 9 aa, Homo sapiens
FHGPAFSTL

SEQ ID NO: 3143 - protein, 9 aa, Homo sapiens
AHPNASLTM

SEQ ID NO: 3144 - protein, 9 aa, Homo sapiens
SACCSGDPA

SEQ ID NO: 3145 - protein, 9 aa, Homo sapiens
DPASYRLWG

SEQ ID NO: 3146 - protein, 9 aa, Homo sapiens
ATPAGPMPC

SEQ ID NO: 3147 - protein, 9 aa, Homo sapiens
LGVVPQASV

SEQ ID NO: 3148 - protein, 9 aa, Homo sapiens
ASLTMYVCA

SEQ ID NO: 3149 - protein, 9 aa, Homo sapiens
EAHPNASLT

SEQ ID NO: 3150 - protein, 9 aa, Homo sapiens
NASLTMYVC

SEQ ID NO: 3151 - protein, 9 aa, Homo sapiens
NPVLRHLFP

SEQ ID NO: 3152 - protein, 9 aa, Homo sapiens
DLSQVWSVV

SEQ ID NO: 3153 - protein, 9 aa, Homo sapiens
EPVLVPEAH

SEQ ID NO: 3154 - protein, 9 aa, Homo sapiens
QPTLGVVPQ

SEQ ID NO: 3155 - protein, 9 aa, Homo sapiens
NPLCCCFHG

SEQ ID NO: 3156 - protein, 9 aa, Homo sapiens
FPQEAFPAH

SEQ ID NO: 3157 - protein, 9 aa, Homo sapiens
TPTCATPAG

SEQ ID NO: 3158 - protein, 9 aa, Homo sapiens
VPLLTHPAQ

SEQ ID NO: 3159 - protein, 9 aa, Homo sapiens
GPAFSTLNP

SEQ ID NO: 3160 - protein, 9 aa, Homo sapiens
HPDPPMALS

SEQ ID NO: 3161 - protein, 9 aa, Homo sapiens
CSRLPPSLR

SEQ ID NO: 3162 - protein, 9 aa, Homo sapiens
AVTPTCATP

SEQ ID NO: 3163 - protein, 9 aa, Homo sapiens
VPEAHPNAS

SEQ ID NO: 3164 - protein, 9 aa, Homo sapiens
RTSRAVTPT

SEQ ID NO: 3165 - protein, 9 aa, Homo sapiens
DGPSNPLCC

SEQ ID NO: 3166 - protein, 9 aa, Homo sapiens
VTPTCATPA

SEQ ID NO: 3167 - protein, 9 aa, Homo sapiens
GSIDTDPPA

SEQ ID NO: 3168 - protein, 9 aa, Homo sapiens
RTTTWARRT

SEQ ID NO: 3169 - protein, 9 aa, Homo sapiens
VLRHLFPQE

SEQ ID NO: 3170 - protein, 9 aa, Homo sapiens
RCSLHSACC

SEQ ID NO: 3171 - protein, 9 aa, Homo sapiens
LCCCFHGPA

SEQ ID NO: 3172 - protein, 9 aa, Homo sapiens
MTHRTTTWA

SEQ ID NO: 3173 - protein, 9 aa, Homo sapiens
SVVSPAPSR

SEQ ID NO: 3174 - protein, 9 aa, Homo sapiens
YVCAPVPHP

SEQ ID NO: 3175 - protein, 9 aa, Homo sapiens
ACCSGDPAS

SEQ ID NO: 3176 - protein, 9 aa, Homo sapiens
EAFPAHPIY

SEQ ID NO: 3177 - protein, 9 aa, Homo sapiens
PEAHPNASL

SEQ ID NO: 3178 - protein, 9 aa, Homo sapiens
PPMALSRTP

SEQ ID NO: 3179 - protein, 9 aa, Homo sapiens
PHPDPPMAL

SEQ ID NO: 3180 - protein, 9 aa, Homo sapiens
PAQWEPVLV

SEQ ID NO: 3181 - protein, 9 aa, Homo sapiens
PAFSTLNPV

SEQ ID NO: 3182 - protein, 9 aa, Homo sapiens
QEAFPAHPI

SEQ ID NO: 3183 - protein, 9 aa, Homo sapiens
VVSPAPSRG

SEQ ID NO: 3184 - protein, 9 aa, Homo sapiens
GVVPQASVP

SEQ ID NO: 3185 - protein, 9 aa, Homo sapiens
CAPVPHPDP

SEQ ID NO: 3186 - protein, 9 aa, Homo sapiens
AQWEPVLVP

SEQ ID NO: 3187 - protein, 9 aa, Homo sapiens
QASVPLLTH

SEQ ID NO: 3188 - protein, 9 aa, Homo sapiens
ASYRLWGAP

SEQ ID NO: 3189 - protein, 9 aa, Homo sapiens
ADGPSNPLC

SEQ ID NO: 3190 - protein, 9 aa, Homo sapiens
GAPLQPTLG

SEQ ID NO: 3191 - protein, 9 aa, Homo sapiens
MALSRTPTR

SEQ ID NO: 3192 - protein, 9 aa, Homo sapiens
PASYRLWGA

SEQ ID NO: 3193 - protein, 9 aa, Homo sapiens
ASVPLLTHP

SEQ ID NO: 3194 - protein, 9 aa, Homo sapiens
TTTWARRTS

SEQ ID NO: 3195 - protein, 9 aa, Homo sapiens
CATPAGPMP

SEQ ID NO: 3196 - protein, 9 aa, Homo sapiens
ALSRTPTRQ

SEQ ID NO: 3197 - protein, 9 aa, Homo sapiens
LNPVLRHLF

SEQ ID NO: 3198 - protein, 9 aa, Homo sapiens
CCFHGPAFS

SEQ ID NO: 3199 - protein, 9 aa, Homo sapiens
PLQPTLGVV

SEQ ID NO: 3200 - protein, 9 aa, Homo sapiens
PPADGPSNP

SEQ ID NO: 3201 - protein, 9 aa, Homo sapiens
RLPPSLRCS

SEQ ID NO: 3202 - protein, 9 aa, Homo sapiens
GPMPCSRLL

SEQ ID NO: 3203 - protein, 9 aa, Homo sapiens
LLPSLRCSL

SEQ ID NO: 3204 - protein, 9 aa, Homo sapiens
MPCSRLLPS

SEQ ID NO: 3205 - protein, 9 aa, Homo sapiens
PCSRLLPSL

SEQ ID NO: 3206 - protein, 9 aa, Homo sapiens
LPSLRCSLH

SEQ ID NO: 3207 - protein, 9 aa, Homo sapiens
CSRLLPSLR

SEQ ID NO: 3208 - protein, 9 aa, Homo sapiens
RLLPSLRCS

SEQ ID NO: 3209 - protein, 9 aa, Homo sapiens
SRLLPSLRC

SEQ ID NO: 3210 - protein, 9 aa, Homo sapiens
PMPCSRLLP

SEQ ID NO: 3211 - protein, 9 aa, Homo sapiens
SSRLWGAPL

SEQ ID NO: 3212 - protein, 9 aa, Homo sapiens
SGDPASSRL

SEQ ID NO: 3213 - protein, 9 aa, Homo sapiens
DPASSRLWG

SEQ ID NO: 3214 - protein, 9 aa, Homo sapiens
PASSRLWGA

SEQ ID NO: 3215 - protein, 9 aa, Homo sapiens
ASSRLWGAP

SEQ ID NO: 3216 - protein, 9 aa, Homo sapiens
CCSGDPASS

SEQ ID NO: 3217 - protein, 9 aa, Homo sapiens
CSGDPASSR

SEQ ID NO: 3218 - protein, 9 aa, Homo sapiens
GDPASSRLW

SEQ ID NO: 3219 - protein, 9 aa, Homo sapiens
SRLWGAPLQ

SEQ ID NO: 3220 - protein, 9 aa, Homo sapiens
DPAQWEPVL

SEQ ID NO: 3221 - protein, 9 aa, Homo sapiens
SVPLLTDPA

SEQ ID NO: 3222 - protein, 9 aa, Homo sapiens
VPLLTDPAQ

SEQ ID NO: 3223 - protein, 9 aa, Homo sapiens
QASVPLLTD

SEQ ID NO: 3224 - protein, 9 aa, Homo sapiens
ASVPLLTDP

SEQ ID NO: 3225 - protein, 9 aa, Homo sapiens
TDPAQWEPV

SEQ ID NO: 3226 - protein, 9 aa, Homo sapiens
LLTDPAQWE

SEQ ID NO: 3227 - protein, 9 aa, Homo sapiens
LTDPAQWEP

SEQ ID NO: 3228 - protein, 9 aa, Homo sapiens
PLLTDPAQW

SEQ ID NO: 3229 - protein, 9 aa, Homo sapiens
ASVPLLTDL

SEQ ID NO: 3230 - protein, 9 aa, Homo sapiens
DLAQWEPVL

SEQ ID NO: 3231 - protein, 9 aa, Homo sapiens
SVPLLTDLA

SEQ ID NO: 3232 - protein, 9 aa, Homo sapiens
VPLLTDLAQ

SEQ ID NO: 3233 - protein, 9 aa, Homo sapiens
TDLAQWEPV

SEQ ID NO: 3234 - protein, 9 aa, Homo sapiens
LLTDLAQWE

SEQ ID NO: 3235 - protein, 9 aa, Homo sapiens
LTDLAQWEP

SEQ ID NO: 3236 - protein, 9 aa, Homo sapiens
PLLTDLAQW

SEQ ID NO: 3237 - protein, 9 aa, Homo sapiens
ASVPLLTHL

SEQ ID NO: 3238 - protein, 9 aa, Homo sapiens
HLAQWEPVL

SEQ ID NO: 3239 - protein, 9 aa, Homo sapiens
LAQWEPVLV

SEQ ID NO: 3240 - protein, 9 aa, Homo sapiens
SVPLLTHLA

SEQ ID NO: 3241 - protein, 9 aa, Homo sapiens
VPLLTHLAQ

SEQ ID NO: 3242 - protein, 9 aa, Homo sapiens
THLAQWEPV

SEQ ID NO: 3243 - protein, 9 aa, Homo sapiens
LTHLAQWEP

SEQ ID NO: 3244 - protein, 9 aa, Homo sapiens
LLTHLAQWE

SEQ ID NO: 3245 - protein, 9 aa, Homo sapiens
PLLTHLAQW

SEQ ID NO: 3246 - protein, 9 aa, Homo sapiens
LTMYVCTPV

SEQ ID NO: 3247 - protein, 9 aa, Homo sapiens
ASLTMYVCT

SEQ ID NO: 3248 - protein, 9 aa, Homo sapiens
YVCTPVPHP

SEQ ID NO: 3249 - protein, 9 aa, Homo sapiens
CTPVPHPDP

SEQ ID NO: 3250 - protein, 9 aa, Homo sapiens
TMYVCTPVP

SEQ ID NO: 3251 - protein, 9 aa, Homo sapiens
VCTPVPHPD

SEQ ID NO: 3252 - protein, 9 aa, Homo sapiens
SLTMYVCTP

SEQ ID NO: 3253 - protein, 9 aa, Homo sapiens
MYVCTPVPH

SEQ ID NO: 3254 - protein, 9 aa, Homo sapiens
TPTRQISSI

SEQ ID NO: 3255 - protein, 9 aa, Homo sapiens
SSIDTDPPA

SEQ ID NO: 3256 - protein, 9 aa, Homo sapiens
RTPTRQISS

SEQ ID NO: 3257 - protein, 9 aa, Homo sapiens
ISSIDTDPP

SEQ ID NO: 3258 - protein, 9 aa, Homo sapiens
QISSIDTDP

SEQ ID NO: 3259 - protein, 9 aa, Homo sapiens
PTRQISSID

SEQ ID NO: 3260 - protein, 9 aa, Homo sapiens
RQISSIDTD

SEQ ID NO: 3261 - protein, 9 aa, Homo sapiens
TRQISSIDT

SEQ ID NO: 3262 - protein, 9 aa, Homo sapiens
SRTPTRQIS

SEQ ID NO: 3263 - protein, 9 aa, Homo sapiens
TPTRQISSS

SEQ ID NO: 3264 - protein, 9 aa, Homo sapiens
SSSDTDPPA

SEQ ID NO: 3265 - protein, 9 aa, Homo sapiens
QISSSDTDP

SEQ ID NO: 3266 - protein, 9 aa, Homo sapiens
ISSSDTDPP

SEQ ID NO: 3267 - protein, 9 aa, Homo sapiens
TRQISSSDT

SEQ ID NO: 3268 - protein, 9 aa, Homo sapiens
PTRQISSSD

SEQ ID NO: 3269 - protein, 9 aa, Homo sapiens
RQISSSDTD

SEQ ID NO: 3270 - protein, 9 aa, Homo sapiens
TPTRQIGSS

SEQ ID NO: 3271 - protein, 9 aa, Homo sapiens
GSSDTDPPA

SEQ ID NO: 3272 - protein, 9 aa, Homo sapiens
QIGSSDTDP

SEQ ID NO: 3273 - protein, 9 aa, Homo sapiens
IGSSDTDPP

SEQ ID NO: 3274 - protein, 9 aa, Homo sapiens
RQIGSSDTD

SEQ ID NO: 3275 - protein, 9 aa, Homo sapiens
TRQIGSSDT

SEQ ID NO: 3276 - protein, 9 aa, Homo sapiens
PTRQIGSSD

SEQ ID NO: 3277 - protein, 9 aa, Homo sapiens
SSDTDPPAD

SEQ ID NO: 3278 - protein, 9 aa, Homo sapiens
SDTDPPADG

SEQ ID NO: 3279 - protein, 9 aa, Homo sapiens
RGQALRRAQ

SEQ ID NO: 3280 - protein, 9 aa, Homo sapiens
SRGQALRRA

SEQ ID NO: 3281 - protein, 10 aa, Homo sapiens
TARIRAVGLL

SEQ ID NO: 3282 - protein, 10 aa, Homo sapiens
QPAAAILALL

SEQ ID NO: 3283 - protein, 10 aa, Homo sapiens
AAILALLPAL

SEQ ID NO: 3284 - protein, 10 aa, Homo sapiens
ALLPALGLLL

SEQ ID NO: 3285 - protein, 10 aa, Homo sapiens
LALLPALGLL

SEQ ID NO: 3286 - protein, 10 aa, Homo sapiens
HALQPAAAIL

SEQ ID NO: 3287 - protein, 10 aa, Homo sapiens
LALLMAGLAL

SEQ ID NO: 3288 - protein, 10 aa, Homo sapiens
KAQVSNEDCL

SEQ ID NO: 3289 - protein, 10 aa, Homo sapiens
LALQPGTALL

SEQ ID NO: 3290 - protein, 10 aa, Homo sapiens
ILALLPALGL

SEQ ID NO: 3291 - protein, 10 aa, Homo sapiens
GLALQPGTAL

SEQ ID NO: 3292 - protein, 10 aa, Homo sapiens
CLQVENCTQL

SEQ ID NO: 3293 - protein, 10 aa, Homo sapiens
LTVISKGCSL

SEQ ID NO: 3294 - protein, 10 aa, Homo sapiens
LCNASGAHAL

SEQ ID NO: 3295 - protein, 10 aa, Homo sapiens
GLLLWGPGQL

SEQ ID NO: 3296 - protein, 10 aa, Homo sapiens
LQPAAAILAL

SEQ ID NO: 3297 - protein, 10 aa, Homo sapiens
WTARIRAVGL

SEQ ID NO: 3298 - protein, 10 aa, Homo sapiens
VLLALLMAGL

SEQ ID NO: 3299 - protein, 10 aa, Homo sapiens
KNITCCDTDL

SEQ ID NO: 3300 - protein, 10 aa, Homo sapiens
RIRAVGLLTV

SEQ ID NO: 3301 - protein, 10 aa, Homo sapiens
QVSNEDCLQV

SEQ ID NO: 3302 - protein, 10 aa, Homo sapiens
AAAILALLPA

SEQ ID NO: 3303 - protein, 10 aa, Homo sapiens
YVGKKNITCC

SEQ ID NO: 3304 - protein, 10 aa, Homo sapiens
QPGTALLCYS

SEQ ID NO: 3305 - protein, 10 aa, Homo sapiens
CVDDSQDYYV

SEQ ID NO: 3306 - protein, 10 aa, Homo sapiens
AGLALQPGTA

SEQ ID NO: 3307 - protein, 10 aa, Homo sapiens
ALQPAAAILA

SEQ ID NO: 3308 - protein, 10 aa, Homo sapiens
MAGLALQPGT

SEQ ID NO: 3309 - protein, 10 aa, Homo sapiens
GAHALQPAAA

SEQ ID NO: 3310 - protein, 10 aa, Homo sapiens
ASGAHALQPA

SEQ ID NO: 3311 - protein, 10 aa, Homo sapiens
KAVLLALLMA

SEQ ID NO: 3312 - protein, 10 aa, Homo sapiens
TALLCYSCKA

SEQ ID NO: 3313 - protein, 10 aa, Homo sapiens
ALQPGTALLC

SEQ ID NO: 3314 - protein, 10 aa, Homo sapiens
ISKGCSLNCV

SEQ ID NO: 3315 - protein, 10 aa, Homo sapiens
LPALGLLLWG

SEQ ID NO: 3316 - protein, 10 aa, Homo sapiens
LLCYSCKAQV

SEQ ID NO: 3317 - protein, 10 aa, Homo sapiens
QCWTARIRAV

SEQ ID NO: 3318 - protein, 10 aa, Homo sapiens
AHALQPAAAI

SEQ ID NO: 3319 - protein, 10 aa, Homo sapiens
AVLLALLMAG

SEQ ID NO: 3320 - protein, 10 aa, Homo sapiens
EQCWTARIRA

SEQ ID NO: 3321 - protein, 10 aa, Homo sapiens
AVGLLTVISK

SEQ ID NO: 3322 - protein, 10 aa, Homo sapiens
LGEQCWTARI

SEQ ID NO: 3323 - protein, 10 aa, Homo sapiens
CTQLGEQCWT

SEQ ID NO: 3324 - protein, 10 aa, Homo sapiens
TVISKGCSLN

SEQ ID NO: 3325 - protein, 10 aa, Homo sapiens
GLLTVISKGC

SEQ ID NO: 3326 - protein, 10 aa, Homo sapiens
VISKGCSLNC

SEQ ID NO: 3327 - protein, 10 aa, Homo sapiens
LLALLMAGLA

SEQ ID NO: 3328 - protein, 10 aa, Homo sapiens
DLCNASGAHA

SEQ ID NO: 3329 - protein, 10 aa, Homo sapiens
TQLGEQCWTA

SEQ ID NO: 3330 - protein, 10 aa, Homo sapiens
ENCTQLGEQC

SEQ ID NO: 3331 - protein, 10 aa, Homo sapiens
MKAVLLALLM

SEQ ID NO: 3332 - protein, 10 aa, Homo sapiens
SGAHALQPAA

SEQ ID NO: 3333 - protein, 10 aa, Homo sapiens
NITCCDTDLC

SEQ ID NO: 3334 - protein, 10 aa, Homo sapiens
TCCDTDLCNA

SEQ ID NO: 3335 - protein, 10 aa, Homo sapiens
RAVGLLTVIS

SEQ ID NO: 3336 - protein, 10 aa, Homo sapiens
QDYYVGKKNI

SEQ ID NO: 3337 - protein, 10 aa, Homo sapiens
IRAVGLLTVI

SEQ ID NO: 3338 - protein, 10 aa, Homo sapiens
ARIRAVGLLT

SEQ ID NO: 3339 - protein, 10 aa, Homo sapiens
AILALLPALG

SEQ ID NO: 3340 - protein, 10 aa, Homo sapiens
ALGLLLWGPG

SEQ ID NO: 3341 - protein, 10 aa, Homo sapiens
LLMAGLALQP

SEQ ID NO: 3342 - protein, 10 aa, Homo sapiens
AQVSNEDCLQ

SEQ ID NO: 3343 - protein, 10 aa, Homo sapiens
NASGAHALQP

SEQ ID NO: 3344 - protein, 10 aa, Homo sapiens
ALLCYSCKAQ

SEQ ID NO: 3345 - protein, 10 aa, Homo sapiens
ALLMAGLALQ

SEQ ID NO: 3346 - protein, 10 aa, Homo sapiens
DTDLCNASGA

SEQ ID NO: 3347 - protein, 10 aa, Homo sapiens
NCVDDSQDYY

SEQ ID NO: 3348 - protein, 10 aa, Homo sapiens
LLTVISKGCS

SEQ ID NO: 3349 - protein, 10 aa, Homo sapiens
GCSLNCVDDS

SEQ ID NO: 3350 - protein, 10 aa, Homo sapiens
LNCVDDSQDY

SEQ ID NO: 3351 - protein, 10 aa, Homo sapiens
NCTQLGEQCW

SEQ ID NO: 3352 - protein, 10 aa, Homo sapiens
LLPALGLLLW

SEQ ID NO: 3353 - protein, 10 aa, Homo sapiens
ITCCDTDLCN

SEQ ID NO: 3354 - protein, 10 aa, Homo sapiens
LCYSCKAQVS

SEQ ID NO: 3355 - protein, 10 aa, Homo sapiens
LQPGTALLCY

SEQ ID NO: 3356 - protein, 10 aa, Homo sapiens
QVENCTQLGE

SEQ ID NO: 3357 - protein, 10 aa, Homo sapiens
DCLQVENCTQ

SEQ ID NO: 3358 - protein, 10 aa, Homo sapiens
EDCLQVENCT

SEQ ID NO: 3359 - protein, 10 aa, Homo sapiens
SCKAQVSNED

SEQ ID NO: 3360 - protein, 10 aa, Homo sapiens
VGKKNITCCD

SEQ ID NO: 3361 - protein, 10 aa, Homo sapiens
KGCSLNCVDD

SEQ ID NO: 3362 - protein, 10 aa, Homo sapiens
DSQDYYVGKK

SEQ ID NO: 3363 - protein, 10 aa, Homo sapiens
CKAQVSNEDC

SEQ ID NO: 3364 - protein, 10 aa, Homo sapiens
CNASGAHALQ

SEQ ID NO: 3365 - protein, 10 aa, Homo sapiens
SLNCVDDSQD

SEQ ID NO: 3366 - protein, 10 aa, Homo sapiens
GKKNITCCDT

SEQ ID NO: 3367 - protein, 10 aa, Homo sapiens
CSLNCVDDSQ

SEQ ID NO: 3368 - protein, 10 aa, Homo sapiens
DYYVGKKNIT

SEQ ID NO: 3369 - protein, 10 aa, Homo sapiens
YYVGKKNITC

SEQ ID NO: 3370 - protein, 10 aa, Homo sapiens
VSNEDCLQVE

SEQ ID NO: 3371 - protein, 10 aa, Homo sapiens
YSCKAQVSNE

SEQ ID NO: 3372 - protein, 10 aa, Homo sapiens
PGTALLCYSC

SEQ ID NO: 3373 - protein, 10 aa, Homo sapiens
LMAGLALQPG

SEQ ID NO: 3374 - protein, 10 aa, Homo sapiens
VGLLTVISKG

SEQ ID NO: 3375 - protein, 10 aa, Homo sapiens
LQVENCTQLG

SEQ ID NO: 3376 - protein, 10 aa, Homo sapiens
QLGEQCWTAR

SEQ ID NO: 3377 - protein, 10 aa, Homo sapiens
LGLLLWGPGQ

SEQ ID NO: 3378 - protein, 10 aa, Homo sapiens
GTALLCYSCK

SEQ ID NO: 3379 - protein, 10 aa, Homo sapiens
CCDTDLCNAS

SEQ ID NO: 3380 - protein, 10 aa, Homo sapiens
SQDYYVGKKN

SEQ ID NO: 3381 - protein, 10 aa, Homo sapiens
VPHPDPPMAL

SEQ ID NO: 3382 - protein, 10 aa, Homo sapiens
APVPHPDPPM

SEQ ID NO: 3383 - protein, 10 aa, Homo sapiens
MPCSRLPPSL

SEQ ID NO: 3384 - protein, 10 aa, Homo sapiens
SPAPSRGQAL

SEQ ID NO: 3385 - protein, 10 aa, Homo sapiens
VPEAHPNASL

SEQ ID NO: 3386 - protein, 10 aa, Homo sapiens
GVVPQASVPL

SEQ ID NO: 3387 - protein, 10 aa, Homo sapiens
VVPQASVPLL

SEQ ID NO: 3388 - protein, 10 aa, Homo sapiens
PPADGPSNPL

SEQ ID NO: 3389 - protein, 10 aa, Homo sapiens
ASYRLWGAPL

SEQ ID NO: 3390 - protein, 10 aa, Homo sapiens
APLQPTLGVV

SEQ ID NO: 3391 - protein, 10 aa, Homo sapiens
RLPPSLRCSL

SEQ ID NO: 3392 - protein, 10 aa, Homo sapiens
WARRTSRAVT

SEQ ID NO: 3393 - protein, 10 aa, Homo sapiens
GPAFSTLNPV

SEQ ID NO: 3394 - protein, 10 aa, Homo sapiens
HPNASLTMYV

SEQ ID NO: 3395 - protein, 10 aa, Homo sapiens
CSGDPASYRL

SEQ ID NO: 3396 - protein, 10 aa, Homo sapiens
HPAQWEPVLV

SEQ ID NO: 3397 - protein, 10 aa, Homo sapiens
STLNPVLRHL

SEQ ID NO: 3398 - protein, 10 aa, Homo sapiens
EAHPNASLTM

SEQ ID NO: 3399 - protein, 10 aa, Homo sapiens
QPTLGVVPQA

SEQ ID NO: 3400 - protein, 10 aa, Homo sapiens
VPQASVPLLT

SEQ ID NO: 3401 - protein, 10 aa, Homo sapiens
DPASYRLWGA

SEQ ID NO: 3402 - protein, 10 aa, Homo sapiens
AFPAHPIYDL

SEQ ID NO: 3403 - protein, 10 aa, Homo sapiens
PAGPMPCSRL

SEQ ID NO: 3404 - protein, 10 aa, Homo sapiens
ALSRTPTRQI

SEQ ID NO: 3405 - protein, 10 aa, Homo sapiens
AVTPTCATPA

SEQ ID NO: 3406 - protein, 10 aa, Homo sapiens
CSRLPPSLRC

SEQ ID NO: 3407 - protein, 10 aa, Homo sapiens
PAFSTLNPVL

SEQ ID NO: 3408 - protein, 10 aa, Homo sapiens
SLRCSLHSAC

SEQ ID NO: 3409 - protein, 10 aa, Homo sapiens
TSRAVTPTCA

SEQ ID NO: 3410 - protein, 10 aa, Homo sapiens
VLRHLFPQEA

SEQ ID NO: 3411 - protein, 10 aa, Homo sapiens
PPMALSRTPT

SEQ ID NO: 3412 - protein, 10 aa, Homo sapiens
GPMPCSRLPP

SEQ ID NO: 3413 - protein, 10 aa, Homo sapiens
GAPLQPTLGV

SEQ ID NO: 3414 - protein, 10 aa, Homo sapiens
APSRGQALRR

SEQ ID NO: 3415 - protein, 10 aa, Homo sapiens
HPIYDLSQVW

SEQ ID NO: 3416 - protein, 10 aa, Homo sapiens
RTPTRQIGSI

SEQ ID NO: 3417 - protein, 10 aa, Homo sapiens
THPAQWEPVL

SEQ ID NO: 3418 - protein, 10 aa, Homo sapiens
LWGAPLQPTL

SEQ ID NO: 3419 - protein, 10 aa, Homo sapiens
GPSNPLCCCF

SEQ ID NO: 3420 - protein, 10 aa, Homo sapiens
FPAHPIYDLS

SEQ ID NO: 3421 - protein, 10 aa, Homo sapiens
CFHGPAFSTL

SEQ ID NO: 3422 - protein, 10 aa, Homo sapiens
VPLLTHPAQW

SEQ ID NO: 3423 - protein, 10 aa, Homo sapiens
EPVLVPEAHP

SEQ ID NO: 3424 - protein, 10 aa, Homo sapiens
TLGVVPQASV

SEQ ID NO: 3425 - protein, 10 aa, Homo sapiens
CATPAGPMPC

SEQ ID NO: 3426 - protein, 10 aa, Homo sapiens
NASLTMYVCA

SEQ ID NO: 3427 - protein, 10 aa, Homo sapiens
ASVPLLTHPA

SEQ ID NO: 3428 - protein, 10 aa, Homo sapiens
DPPADGPSNP

SEQ ID NO: 3429 - protein, 10 aa, Homo sapiens
LPPSLRCSLH

SEQ ID NO: 3430 - protein, 10 aa, Homo sapiens
TPAGPMPCSR

SEQ ID NO: 3431 - protein, 10 aa, Homo sapiens
NPVLRHLFPQ

SEQ ID NO: 3432 - protein, 10 aa, Homo sapiens
DPPMALSRTP

SEQ ID NO: 3433 - protein, 10 aa, Homo sapiens
FPQEAFPAHP

SEQ ID NO: 3434 - protein, 10 aa, Homo sapiens
TPTCATPAGP

SEQ ID NO: 3435 - protein, 10 aa, Homo sapiens
NPLCCCFHGP

SEQ ID NO: 3436 - protein, 10 aa, Homo sapiens
SLTMYVCAPV

SEQ ID NO: 3437 - protein, 10 aa, Homo sapiens
TPTRQIGSID

SEQ ID NO: 3438 - protein, 10 aa, Homo sapiens
LTHPAQWEPV

SEQ ID NO: 3439 - protein, 10 aa, Homo sapiens
RLWGAPLQPT

SEQ ID NO: 3440 - protein, 10 aa, Homo sapiens
LSRTPTRQIG

SEQ ID NO: 3441 - protein, 10 aa, Homo sapiens
CCFHGPAFST

SEQ ID NO: 3442 - protein, 10 aa, Homo sapiens
DGPSNPLCCC

SEQ ID NO: 3443 - protein, 10 aa, Homo sapiens
VSPAPSRGQA

SEQ ID NO: 3444 - protein, 10 aa, Homo sapiens
PTCATPAGPM

SEQ ID NO: 3445 - protein, 10 aa, Homo sapiens
PSRGQALRRA

SEQ ID NO: 3446 - protein, 10 aa, Homo sapiens
HLFPQEAFPA

SEQ ID NO: 3447 - protein, 10 aa, Homo sapiens
RTSRAVTPTC

SEQ ID NO: 3448 - protein, 10 aa, Homo sapiens
TTWARRTSRA

SEQ ID NO: 3449 - protein, 10 aa, Homo sapiens
VLVPEAHPNA

SEQ ID NO: 3450 - protein, 10 aa, Homo sapiens
IGSIDTDPPA

SEQ ID NO: 3451 - protein, 10 aa, Homo sapiens
LVPEAHPNAS

SEQ ID NO: 3452 - protein, 10 aa, Homo sapiens
SQVWSVVSPA

SEQ ID NO: 3453 - protein, 10 aa, Homo sapiens
PTRQIGSIDT

SEQ ID NO: 3454 - protein, 10 aa, Homo sapiens
HSACCSGDPA

SEQ ID NO: 3455 - protein, 10 aa, Homo sapiens
ATPAGPMPCS

SEQ ID NO: 3456 - protein, 10 aa, Homo sapiens
VVSPAPSRGQ

SEQ ID NO: 3457 - protein, 10 aa, Homo sapiens
HPDPPMALSR

SEQ ID NO: 3458 - protein, 10 aa, Homo sapiens
AHPIYDLSQV

SEQ ID NO: 3459 - protein, 10 aa, Homo sapiens
SACCSGDPAS

SEQ ID NO: 3460 - protein, 10 aa, Homo sapiens
ACCSGDPASY

SEQ ID NO: 3461 - protein, 10 aa, Homo sapiens
PVPHPDPPMA

SEQ ID NO: 3462 - protein, 10 aa, Homo sapiens
SVPLLTHPAQ

SEQ ID NO: 3463 - protein, 10 aa, Homo sapiens
SVVSPAPSRG

SEQ ID NO: 3464 - protein, 10 aa, Homo sapiens
YVCAPVPHPD

SEQ ID NO: 3465 - protein, 10 aa, Homo sapiens
QVWSVVSPAP

SEQ ID NO: 3466 - protein, 10 aa, Homo sapiens
PPSLRCSLHS

SEQ ID NO: 3467 - protein, 10 aa, Homo sapiens
AGPMPCSRLP

SEQ ID NO: 3468 - protein, 10 aa, Homo sapiens
TLNPVLRHLF

SEQ ID NO: 3469 - protein, 10 aa, Homo sapiens
LTMYVCAPVP

SEQ ID NO: 3470 - protein, 10 aa, Homo sapiens
ASLTMYVCAP

SEQ ID NO: 3471 - protein, 10 aa, Homo sapiens
ADGPSNPLCC

SEQ ID NO: 3472 - protein, 10 aa, Homo sapiens
QASVPLLTHP

SEQ ID NO: 3473 - protein, 10 aa, Homo sapiens
ARRTSRAVTP

SEQ ID NO: 3474 - protein, 10 aa, Homo sapiens
AQWEPVLVPE

SEQ ID NO: 3475 - protein, 10 aa, Homo sapiens
RAVTPTCATP

SEQ ID NO: 3476 - protein, 10 aa, Homo sapiens
CAPVPHPDPP

SEQ ID NO: 3477 - protein, 10 aa, Homo sapiens
MALSRTPTRQ

SEQ ID NO: 3478 - protein, 10 aa, Homo sapiens
RTTTWARRTS

SEQ ID NO: 3479 - protein, 10 aa, Homo sapiens
EAFPAHPIYD

SEQ ID NO: 3480 - protein, 10 aa, Homo sapiens
YDLSQVWSVV

SEQ ID NO: 3481 - protein, 10 aa, Homo sapiens
MPCSRLLPSL

SEQ ID NO: 3482 - protein, 10 aa, Homo sapiens
AGPMPCSRLL

SEQ ID NO: 3483 - protein, 10 aa, Homo sapiens
RLLPSLRCSL

SEQ ID NO: 3484 - protein, 10 aa, Homo sapiens
CSRLLPSLRC

SEQ ID NO: 3485 - protein, 10 aa, Homo sapiens
GPMPCSRLLP

SEQ ID NO: 3486 - protein, 10 aa, Homo sapiens
LPSLRCSLHS

SEQ ID NO: 3487 - protein, 10 aa, Homo sapiens
LLPSLRCSLH

SEQ ID NO: 3488 - protein, 10 aa, Homo sapiens
PMPCSRLLPS

SEQ ID NO: 3489 - protein, 10 aa, Homo sapiens
SRLLPSLRCS

SEQ ID NO: 3490 - protein, 10 aa, Homo sapiens
PCSRLLPSLR

SEQ ID NO: 3491 - protein, 9 aa, Homo sapiens
SSRLWGAPL

SEQ ID NO: 3492 - protein, 10 aa, Homo sapiens
CSGDPASSRL

SEQ ID NO: 3493 - protein, 10 aa, Homo sapiens
DPASSRLWGA

SEQ ID NO: 3494 - protein, 10 aa, Homo sapiens
SSRLWGAPLQ

SEQ ID NO: 3495 - protein, 10 aa, Homo sapiens
ACCSGDPASS

SEQ ID NO: 3496 - protein, 10 aa, Homo sapiens
CCSGDPASSR

SEQ ID NO: 3497 - protein, 10 aa, Homo sapiens
SGDPASSRLW

SEQ ID NO: 3498 - protein, 10 aa, Homo sapiens
PASSRLWGAP

SEQ ID NO: 3499 - protein, 10 aa, Homo sapiens
GDPASSRLWG

SEQ ID NO: 3500 - protein, 10 aa, Homo sapiens
SRLWGAPLQP

SEQ ID NO: 3501 - protein, 10 aa, Homo sapiens
DPAQWEPVLV

SEQ ID NO: 3502 - protein, 10 aa, Homo sapiens
TDPAQWEPVL

SEQ ID NO: 3503 - protein, 10 aa, Homo sapiens
VPLLTDPAQW

SEQ ID NO: 3504 - protein, 10 aa, Homo sapiens
ASVPLLTDPA

SEQ ID NO: 3505 - protein, 10 aa, Homo sapiens
LTDPAQWEPV

SEQ ID NO: 3506 - protein, 10 aa, Homo sapiens
SVPLLTDPAQ

SEQ ID NO: 3507 - protein, 10 aa, Homo sapiens
QASVPLLTDP

SEQ ID NO: 3508 - protein, 10 aa, Homo sapiens
LLTDPAQWEP

SEQ ID NO: 3509 - protein, 10 aa, Homo sapiens
PLLTDPAQWE

SEQ ID NO: 3510 - protein, 10 aa, Homo sapiens
PQASVPLLTD

SEQ ID NO: 3511 - protein, 10 aa, Homo sapiens
QASVPLLTDL

SEQ ID NO: 3512 - protein, 10 aa, Homo sapiens
TDLAQWEPVL

SEQ ID NO: 3513 - protein, 10 aa, Homo sapiens
VPLLTDLAQW

SEQ ID NO: 3514 - protein, 10 aa, Homo sapiens
ASVPLLTDLA

SEQ ID NO: 3515 - protein, 10 aa, Homo sapiens
DLAQWEPVLV

SEQ ID NO: 3516 - protein, 10 aa, Homo sapiens
LTDLAQWEPV

SEQ ID NO: 3517 - protein, 10 aa, Homo sapiens
SVPLLTDLAQ

SEQ ID NO: 3518 - protein, 10 aa, Homo sapiens
LLTDLAQWEP

SEQ ID NO: 3519 - protein, 10 aa, Homo sapiens
PLLTDLAQWE

SEQ ID NO: 3520 - protein, 10 aa, Homo sapiens
QASVPLLTHL

SEQ ID NO: 3521 - protein, 10 aa, Homo sapiens
THLAQWEPVL

SEQ ID NO: 3522 - protein, 10 aa, Homo sapiens
VPLLTHLAQW

SEQ ID NO: 3523 - protein, 10 aa, Homo sapiens
ASVPLLTHLA

SEQ ID NO: 3524 - protein, 10 aa, Homo sapiens
LTHLAQWEPV

SEQ ID NO: 3525 - protein, 10 aa, Homo sapiens
HLAQWEPVLV

SEQ ID NO: 3526 - protein, 10 aa, Homo sapiens
SVPLLTHLAQ

SEQ ID NO: 3527 - protein, 10 aa, Homo sapiens
LAQWEPVLVP

SEQ ID NO: 3528 - protein, 10 aa, Homo sapiens
LLTHLAQWEP

SEQ ID NO: 3529 - protein, 10 aa, Homo sapiens
PLLTHLAQWE

SEQ ID NO: 3530 - protein, 10 aa, Homo sapiens
TPVPHPDPPM

SEQ ID NO: 3531 - protein, 10 aa, Homo sapiens
NASLTMYVCT

SEQ ID NO: 3532 - protein, 10 aa, Homo sapiens
SLTMYVCTPV

SEQ ID NO: 3533 - protein, 10 aa, Homo sapiens
YVCTPVPHPD

SEQ ID NO: 3534 - protein, 10 aa, Homo sapiens
ASLTMYVCTP

SEQ ID NO: 3535 - protein, 10 aa, Homo sapiens
LTMYVCTPVP

SEQ ID NO: 3536 - protein, 10 aa, Homo sapiens
VCTPVPHPDP

SEQ ID NO: 3537 - protein, 10 aa, Homo sapiens
CTPVPHPDPP

SEQ ID NO: 3538 - protein, 10 aa, Homo sapiens
TMYVCTPVPH

SEQ ID NO: 3539 - protein, 10 aa, Homo sapiens
MYVCTPVPHP

SEQ ID NO: 3540 - protein, 10 aa, Homo sapiens
RTPTRQISSI

SEQ ID NO: 3541 - protein, 10 aa, Homo sapiens
LSRTPTRQIS

SEQ ID NO: 3542 - protein, 10 aa, Homo sapiens
TPTRQISSID

SEQ ID NO: 3543 - protein, 10 aa, Homo sapiens
ISSIDTDPPA

SEQ ID NO: 3544 - protein, 10 aa, Homo sapiens
PTRQISSIDT

SEQ ID NO: 3545 - protein, 10 aa, Homo sapiens
SSIDTDPPAD

SEQ ID NO: 3546 - protein, 10 aa, Homo sapiens
RQISSIDTDP

SEQ ID NO: 3547 - protein, 10 aa, Homo sapiens
QISSIDTDPP

SEQ ID NO: 3548 - protein, 10 aa, Homo sapiens
SRTPTRQISS

SEQ ID NO: 3549 - protein, 10 aa, Homo sapiens
TRQISSIDTD

SEQ ID NO: 3550 - protein, 10 aa, Homo sapiens
TPTRQISSSD

SEQ ID NO: 3551 - protein, 10 aa, Homo sapiens
ISSSDTDPPA

SEQ ID NO: 3552 - protein, 10 aa, Homo sapiens
PTRQISSSDT

SEQ ID NO: 3553 - protein, 10 aa, Homo sapiens
RTPTRQISSS

SEQ ID NO: 3554 - protein, 10 aa, Homo sapiens
SSSDTDPPAD

SEQ ID NO: 3555 - protein, 10 aa, Homo sapiens
QISSSDTDPP

SEQ ID NO: 3556 - protein, 10 aa, Homo sapiens
RQISSSDTDP

SEQ ID NO: 3557 - protein, 10 aa, Homo sapiens
TRQISSSDTD

SEQ ID NO: 3558 - protein, 10 aa, Homo sapiens
TPTRQIGSSD

SEQ ID NO: 3559 - protein, 10 aa, Homo sapiens
PTRQIGSSDT

SEQ ID NO: 3560 - protein, 10 aa, Homo sapiens
IGSSDTDPPA

SEQ ID NO: 3561 - protein, 10 aa, Homo sapiens
RTPTRQIGSS

SEQ ID NO: 3562 - protein, 10 aa, Homo sapiens
GSSDTDPPAD

SEQ ID NO: 3563 - protein, 10 aa, Homo sapiens
QIGSSDTDPP

SEQ ID NO: 3564 - protein, 10 aa, Homo sapiens
RQIGSSDTDP

SEQ ID NO: 3565 - protein, 10 aa, Homo sapiens
SSDTDPPADG

SEQ ID NO: 3566 - protein, 10 aa, Homo sapiens
SDTDPPADGP

SEQ ID NO: 3567 - protein, 10 aa, Homo sapiens
TRQIGSSDTD

SEQ ID NO: 3568 - protein, 10 aa, Homo sapiens
PSRGQALRRA

SEQ ID NO: 3569 - protein, 10 aa, Homo sapiens
SRGQALRRAQ

SEQ ID NO: 3570 - protein, 9 aa, Homo sapiens
QPGTALLCY

SEQ ID NO: 3571 - protein, 9 aa, Homo sapiens
QPAAAILAL

SEQ ID NO: 3572 - protein, 9 aa, Homo sapiens
KAVLLALLM

SEQ ID NO: 3573 - protein, 9 aa, Homo sapiens
LPALGLLLW

SEQ ID NO: 3574 - protein, 9 aa, Homo sapiens
TARIRAVGL

SEQ ID NO: 3575 - protein, 9 aa, Homo sapiens
NCVDDSQDY

SEQ ID NO: 3576 - protein, 9 aa, Homo sapiens
LALLPALGL

SEQ ID NO: 3577 - protein, 9 aa, Homo sapiens
VSNEDCLQV

SEQ ID NO: 3578 - protein, 9 aa, Homo sapiens
LALQPGTAL

SEQ ID NO: 3579 - protein, 9 aa, Homo sapiens
RAVGLLTVI

SEQ ID NO: 3580 - protein, 9 aa, Homo sapiens
LQVENCTQL

SEQ ID NO: 3581 - protein, 9 aa, Homo sapiens
ISKGCSLNC

SEQ ID NO: 3582 - protein, 9 aa, Homo sapiens
CVDDSQDYY

SEQ ID NO: 3583 - protein, 9 aa, Homo sapiens
HALQPAAAI

SEQ ID NO: 3584 - protein, 9 aa, Homo sapiens
TVISKGCSL

SEQ ID NO: 3585 - protein, 9 aa, Homo sapiens
ALQPAAAIL

SEQ ID NO: 3586 - protein, 9 aa, Homo sapiens
ALLPALGLL

SEQ ID NO: 3587 - protein, 9 aa, Homo sapiens
AILALLPAL

SEQ ID NO: 3588 - protein, 9 aa, Homo sapiens
LLLWGPGQL

SEQ ID NO: 3589 - protein, 9 aa, Homo sapiens
NITCCDTDL

SEQ ID NO: 3590 - protein, 9 aa, Homo sapiens
ALQPGTALL

SEQ ID NO: 3591 - protein, 9 aa, Homo sapiens
AQVSNEDCL

SEQ ID NO: 3592 - protein, 9 aa, Homo sapiens
CNASGAHAL

SEQ ID NO: 3593 - protein, 9 aa, Homo sapiens
LLALLMAGL

SEQ ID NO: 3594 - protein, 9 aa, Homo sapiens
LLPALGLLL

SEQ ID NO: 3595 - protein, 9 aa, Homo sapiens
ALLMAGLAL

SEQ ID NO: 3596 - protein, 9 aa, Homo sapiens
RIRAVGLLT

SEQ ID NO: 3597 - protein, 9 aa, Homo sapiens
KAQVSNEDC

SEQ ID NO: 3598 - protein, 9 aa, Homo sapiens
YSCKAQVSN

SEQ ID NO: 3599 - protein, 9 aa, Homo sapiens
CTQLGEQCW

SEQ ID NO: 3600 - protein, 9 aa, Homo sapiens
CSLNCVDDS

SEQ ID NO: 3601 - protein, 9 aa, Homo sapiens
VGKKNITCC

SEQ ID NO: 3602 - protein, 9 aa, Homo sapiens
AAILALLPA

SEQ ID NO: 3603 - protein, 9 aa, Homo sapiens
PAAAILALL

SEQ ID NO: 3604 - protein, 9 aa, Homo sapiens
GAHALQPAA

SEQ ID NO: 3605 - protein, 9 aa, Homo sapiens
LALLMAGLA

SEQ ID NO: 3606 - protein, 9 aa, Homo sapiens
TCCDTDLCN

SEQ ID NO: 3607 - protein, 9 aa, Homo sapiens
QLGEQCWTA

SEQ ID NO: 3608 - protein, 9 aa, Homo sapiens
LCYSCKAQV

SEQ ID NO: 3609 - protein, 9 aa, Homo sapiens
TQLGEQCWT

SEQ ID NO: 3610 - protein, 9 aa, Homo sapiens
ITCCDTDLC

SEQ ID NO: 3611 - protein, 9 aa, Homo sapiens
LQPAAAILA

SEQ ID NO: 3612 - protein, 9 aa, Homo sapiens
LTVISKGCS

SEQ ID NO: 3613 - protein, 9 aa, Homo sapiens
YVGKKNITC

SEQ ID NO: 3614 - protein, 9 aa, Homo sapiens
GLALQPGTA

SEQ ID NO: 3615 - protein, 9 aa, Homo sapiens
DSQDYYVGK

SEQ ID NO: 3616 - protein, 9 aa, Homo sapiens
QCWTARIRA

SEQ ID NO: 3617 - protein, 9 aa, Homo sapiens
GTALLCYSC

SEQ ID NO: 3618 - protein, 9 aa, Homo sapiens
VISKGCSLN

SEQ ID NO: 3619 - protein, 9 aa, Homo sapiens
LQPGTALLC

SEQ ID NO: 3620 - protein, 9 aa, Homo sapiens
AVGLLTVIS

SEQ ID NO: 3621 - protein, 9 aa, Homo sapiens
AVLLALLMA

SEQ ID NO: 3622 - protein, 9 aa, Homo sapiens
MKAVLLALL

SEQ ID NO: 3623 - protein, 9 aa, Homo sapiens
ARIRAVGLL

SEQ ID NO: 3624 - protein, 9 aa, Homo sapiens
SGAHALQPA

SEQ ID NO: 3625 - protein, 9 aa, Homo sapiens
LCNASGAHA

SEQ ID NO: 3626 - protein, 9 aa, Homo sapiens
ALLCYSCKA

SEQ ID NO: 3627 - protein, 9 aa, Homo sapiens
LLTVISKGC

SEQ ID NO: 3628 - protein, 9 aa, Homo sapiens
DCLQVENCT

SEQ ID NO: 3629 - protein, 9 aa, Homo sapiens
NCTQLGEQC

SEQ ID NO: 3630 - protein, 9 aa, Homo sapiens
AGLALQPGT

SEQ ID NO: 3631 - protein, 9 aa, Homo sapiens
ASGAHALQP

SEQ ID NO: 3632 - protein, 9 aa, Homo sapiens
CCDTDLCNA

SEQ ID NO: 3633 - protein, 9 aa, Homo sapiens
GEQCWTARI

SEQ ID NO: 3634 - protein, 9 aa, Homo sapiens
DYYVGKKNI

SEQ ID NO: 3635 - protein, 9 aa, Homo sapiens
SCKAQVSNE

SEQ ID NO: 3636 - protein, 9 aa, Homo sapiens
TALLCYSCK

SEQ ID NO: 3637 - protein, 9 aa, Homo sapiens
NASGAHALQ

SEQ ID NO: 3638 - protein, 9 aa, Homo sapiens
AAAILALLP

SEQ ID NO: 3639 - protein, 9 aa, Homo sapiens
MAGLALQPG

SEQ ID NO: 3640 - protein, 9 aa, Homo sapiens
KGCSLNCVD

SEQ ID NO: 3641 - protein, 9 aa, Homo sapiens
SKGCSLNCV

SEQ ID NO: 3642 - protein, 9 aa, Homo sapiens
KNITCCDTD

SEQ ID NO: 3643 - protein, 9 aa, Homo sapiens
CDTDLCNAS

SEQ ID NO: 3644 - protein, 9 aa, Homo sapiens
IRAVGLLTV

SEQ ID NO: 3645 - protein, 9 aa, Homo sapiens
KKNITCCDT

SEQ ID NO: 3646 - protein, 9 aa, Homo sapiens
CWTARIRAV

SEQ ID NO: 3647 - protein, 9 aa, Homo sapiens
QVSNEDCLQ

SEQ ID NO: 3648 - protein, 9 aa, Homo sapiens
LNCVDDSQD

SEQ ID NO: 3649 - protein, 9 aa, Homo sapiens
CLQVENCTQ

SEQ ID NO: 3650 - protein, 9 aa, Homo sapiens
LGLLLWGPG

SEQ ID NO: 3651 - protein, 9 aa, Homo sapiens
DLCNASGAH

SEQ ID NO: 3652 - protein, 9 aa, Homo sapiens
GLLLWGPGQ

SEQ ID NO: 3653 - protein, 9 aa, Homo sapiens
EDCLQVENC

SEQ ID NO: 3654 - protein, 9 aa, Homo sapiens
LLCYSCKAQ

SEQ ID NO: 3655 - protein, 9 aa, Homo sapiens
SLNCVDDSQ

SEQ ID NO: 3656 - protein, 9 aa, Homo sapiens
GLLTVISKG

SEQ ID NO: 3657 - protein, 9 aa, Homo sapiens
CYSCKAQVS

SEQ ID NO: 3658 - protein, 9 aa, Homo sapiens
ALGLLLWGP

SEQ ID NO: 3659 - protein, 9 aa, Homo sapiens
PGTALLCYS

SEQ ID NO: 3660 - protein, 9 aa, Homo sapiens
VGLLTVISK

SEQ ID NO: 3661 - protein, 9 aa, Homo sapiens
WTARIRAVG

SEQ ID NO: 3662 - protein, 9 aa, Homo sapiens
LMAGLALQP

SEQ ID NO: 3663 - protein, 9 aa, Homo sapiens
ENCTQLGEQ

SEQ ID NO: 3664 - protein, 9 aa, Homo sapiens
GCSLNCVDD

SEQ ID NO: 3665 - protein, 9 aa, Homo sapiens
AHALQPAAA

SEQ ID NO: 3666 - protein, 9 aa, Homo sapiens
ILALLPALG

SEQ ID NO: 3667 - protein, 9 aa, Homo sapiens
LLMAGLALQ

SEQ ID NO: 3668 - protein, 9 aa, Homo sapiens
EQCWTARIR

SEQ ID NO: 3669 - protein, 9 aa, Homo sapiens
TDLCNASGA

SEQ ID NO: 3670 - protein, 9 aa, Homo sapiens
HPNASLTMY

SEQ ID NO: 3671 - protein, 9 aa, Homo sapiens
HPAQWEPVL

SEQ ID NO: 3672 - protein, 9 aa, Homo sapiens
LPPSLRCSL

SEQ ID NO: 3673 - protein, 9 aa, Homo sapiens
FPAHPIYDL

SEQ ID NO: 3674 - protein, 9 aa, Homo sapiens
VPQASVPLL

SEQ ID NO: 3675 - protein, 9 aa, Homo sapiens
TPTRQIGSI

SEQ ID NO: 3676 - protein, 9 aa, Homo sapiens
HPIYDLSQV

SEQ ID NO: 3677 - protein, 9 aa, Homo sapiens
EAFPAHPIY

SEQ ID NO: 3678 - protein, 9 aa, Homo sapiens
LSRTPTRQI

SEQ ID NO: 3679 - protein, 9 aa, Homo sapiens
APLQPTLGV

SEQ ID NO: 3680 - protein, 9 aa, Homo sapiens
DPPADGPSN

SEQ ID NO: 3681 - protein, 9 aa, Homo sapiens
VPHPDPPMA

SEQ ID NO: 3682 - protein, 9 aa, Homo sapiens
CCSGDPASY

SEQ ID NO: 3683 - protein, 9 aa, Homo sapiens
GPSNPLCCC

SEQ ID NO: 3684 - protein, 9 aa, Homo sapiens
MPCSRLPPS

SEQ ID NO: 3685 - protein, 9 aa, Homo sapiens
SPAPSRGQA

SEQ ID NO: 3686 - protein, 9 aa, Homo sapiens
TPAGPMPCS

SEQ ID NO: 3687 - protein, 9 aa, Homo sapiens
TCATPAGPM

SEQ ID NO: 3688 - protein, 9 aa, Homo sapiens
DPPMALSRT

SEQ ID NO: 3689 - protein, 9 aa, Homo sapiens
WARRTSRAV

SEQ ID NO: 3690 - protein, 9 aa, Homo sapiens
TSRAVTPTC

SEQ ID NO: 3691 - protein, 9 aa, Homo sapiens
LNPVLRHLF

SEQ ID NO: 3692 - protein, 9 aa, Homo sapiens
TLNPVLRHL

SEQ ID NO: 3693 - protein, 9 aa, Homo sapiens
VVPQASVPL

SEQ ID NO: 3694 - protein, 9 aa, Homo sapiens
GSIDTDPPA

SEQ ID NO: 3695 - protein, 9 aa, Homo sapiens
WGAPLQPTL

SEQ ID NO: 3696 - protein, 9 aa, Homo sapiens
AGPMPCSRL

SEQ ID NO: 3697 - protein, 9 aa, Homo sapiens
CCCFHGPAF

SEQ ID NO: 3698 - protein, 9 aa, Homo sapiens
HPDPPMALS

SEQ ID NO: 3699 - protein, 9 aa, Homo sapiens
VPEAHPNAS

SEQ ID NO: 3700 - protein, 9 aa, Homo sapiens
RAVTPTCAT

SEQ ID NO: 3701 - protein, 9 aa, Homo sapiens
PSNPLCCCF

SEQ ID NO: 3702 - protein, 9 aa, Homo sapiens
ASLTMYVCA

SEQ ID NO: 3703 - protein, 9 aa, Homo sapiens
CSLHSACCS

SEQ ID NO: 3704 - protein, 9 aa, Homo sapiens
WSVVSPAPS

SEQ ID NO: 3705 - protein, 9 aa, Homo sapiens
LSQVWSVVS

SEQ ID NO: 3706 - protein, 9 aa, Homo sapiens
FPQEAFPAH

SEQ ID NO: 3707 - protein, 9 aa, Homo sapiens
SLRCSLHSA

SEQ ID NO: 3708 - protein, 9 aa, Homo sapiens
NASLTMYVC

SEQ ID NO: 3709 - protein, 9 aa, Homo sapiens
EAHPNASLT

SEQ ID NO: 3710 - protein, 9 aa, Homo sapiens
PAPSRGQAL

SEQ ID NO: 3711 - protein, 9 aa, Homo sapiens
SGDPASYRL

SEQ ID NO: 3712 - protein, 9 aa, Homo sapiens
SACCSGDPA

SEQ ID NO: 3713 - protein, 9 aa, Homo sapiens
SYRLWGAPL

SEQ ID NO: 3714 - protein, 9 aa, Homo sapiens
RHLFPQEAF

SEQ ID NO: 3715 - protein, 9 aa, Homo sapiens
VPLLTHPAQ

SEQ ID NO: 3716 - protein, 9 aa, Homo sapiens
RTPTRQIGS

SEQ ID NO: 3717 - protein, 9 aa, Homo sapiens
LGVVPQASV

SEQ ID NO: 3718 - protein, 9 aa, Homo sapiens
RTSRAVTPT

SEQ ID NO: 3719 - protein, 9 aa, Homo sapiens
NPLCCCFHG

SEQ ID NO: 3720 - protein, 9 aa, Homo sapiens
DLSQVWSVV

SEQ ID NO: 3721 - protein, 9 aa, Homo sapiens
EPVLVPEAH

SEQ ID NO: 3722 - protein, 9 aa, Homo sapiens
NPVLRHLFP

SEQ ID NO: 3723 - protein, 9 aa, Homo sapiens
GPMPCSRLP

SEQ ID NO: 3724 - protein, 9 aa, Homo sapiens
APSRGQALR

SEQ ID NO: 3725 - protein, 9 aa, Homo sapiens
QPTLGVVPQ

SEQ ID NO: 3726 - protein, 9 aa, Homo sapiens
AHPNASLTM

SEQ ID NO: 3727 - protein, 9 aa, Homo sapiens
LTMYVCAPV

SEQ ID NO: 3728 - protein, 9 aa, Homo sapiens
APVPHPDPP

SEQ ID NO: 3729 - protein, 9 aa, Homo sapiens
TPTCATPAG

SEQ ID NO: 3730 - protein, 9 aa, Homo sapiens
DPASYRLWG

SEQ ID NO: 3731 - protein, 9 aa, Homo sapiens
RLPPSLRCS

SEQ ID NO: 3732 - protein, 9 aa, Homo sapiens
PVPHPDPPM

SEQ ID NO: 3733 - protein, 9 aa, Homo sapiens
RCSLHSACC

SEQ ID NO: 3734 - protein, 9 aa, Homo sapiens
RTTTWARRT

SEQ ID NO: 3735 - protein, 9 aa, Homo sapiens
LVPEAHPNA

SEQ ID NO: 3736 - protein, 9 aa, Homo sapiens
GPAFSTLNP

SEQ ID NO: 3737 - protein, 9 aa, Homo sapiens
CSRLPPSLR

SEQ ID NO: 3738 - protein, 9 aa, Homo sapiens
VLVPEAHPN

SEQ ID NO: 3739 - protein, 9 aa, Homo sapiens
ATPAGPMPC

SEQ ID NO: 3740 - protein, 9 aa, Homo sapiens
VTPTCATPA

SEQ ID NO: 3741 - protein, 9 aa, Homo sapiens
AFSTLNPVL

SEQ ID NO: 3742 - protein, 9 aa, Homo sapiens
LCCCFHGPA

SEQ ID NO: 3743 - protein, 9 aa, Homo sapiens
MTHRTTTWA

SEQ ID NO: 3744 - protein, 9 aa, Homo sapiens
FHGPAFSTL

SEQ ID NO: 3745 - protein, 9 aa, Homo sapiens
CSGDPASYR

SEQ ID NO: 3746 - protein, 9 aa, Homo sapiens
PCSRLPPSL

SEQ ID NO: 3747 - protein, 9 aa, Homo sapiens
TTTWARRTS

SEQ ID NO: 3748 - protein, 9 aa, Homo sapiens
PIYDLSQVW

SEQ ID NO: 3749 - protein, 9 aa, Homo sapiens
SVPLLTHPA

SEQ ID NO: 3750 - protein, 9 aa, Homo sapiens
ACCSGDPAS

SEQ ID NO: 3751 - protein, 9 aa, Homo sapiens
TLGVVPQAS

SEQ ID NO: 3752 - protein, 9 aa, Homo sapiens
QVWSVVSPA

SEQ ID NO: 3753 - protein, 9 aa, Homo sapiens
DGPSNPLCC

SEQ ID NO: 3754 - protein, 9 aa, Homo sapiens
CCFHGPAFS

SEQ ID NO: 3755 - protein, 9 aa, Homo sapiens
HGPAFSTLN

SEQ ID NO: 3756 - protein, 9 aa, Homo sapiens
PADGPSNPL

SEQ ID NO: 3757 - protein, 9 aa, Homo sapiens
PAQWEPVLV

SEQ ID NO: 3758 - protein, 9 aa, Homo sapiens
PAFSTLNPV

SEQ ID NO: 3759 - protein, 9 aa, Homo sapiens
ASVPLLTHP

SEQ ID NO: 3760 - protein, 9 aa, Homo sapiens
FSTLNPVLR

SEQ ID NO: 3761 - protein, 9 aa, Homo sapiens
PLLTHPAQW

SEQ ID NO: 3762 - protein, 9 aa, Homo sapiens
VSPAPSRGQ

SEQ ID NO: 3763 - protein, 9 aa, Homo sapiens
GDPASYRLW

SEQ ID NO: 3764 - protein, 9 aa, Homo sapiens
PSLRCSLHS

SEQ ID NO: 3765 - protein, 9 aa, Homo sapiens
ASYRLWGAP

SEQ ID NO: 3766 - protein, 9 aa, Homo sapiens
HSACCSGDP

SEQ ID NO: 3767 - protein, 9 aa, Homo sapiens
QEAFPAHPI

SEQ ID NO: 3768 - protein, 9 aa, Homo sapiens
PPADGPSNP

SEQ ID NO: 3769 - protein, 9 aa, Homo sapiens
VLRHLFPQE

SEQ ID NO: 3770 - protein, 9 aa, Homo sapiens
GPMPCSRLL

SEQ ID NO: 3771 - protein, 9 aa, Homo sapiens
MPCSRLLPS

SEQ ID NO: 3772 - protein, 9 aa, Homo sapiens
LLPSLRCSL

SEQ ID NO: 3773 - protein, 9 aa, Homo sapiens
RLLPSLRCS

SEQ ID NO: 3774 - protein, 9 aa, Homo sapiens
LPSLRCSLH

SEQ ID NO: 3775 - protein, 9 aa, Homo sapiens
CSRLLPSLR

SEQ ID NO: 3776 - protein, 9 aa, Homo sapiens
PCSRLLPSL

SEQ ID NO: 3777 - protein, 9 aa, Homo sapiens
SRLLPSLRC

SEQ ID NO: 3778 - protein, 9 aa, Homo sapiens
PMPCSRLLP

SEQ ID NO: 3779 - protein, 9 aa, Homo sapiens
SSRLWGAPL

SEQ ID NO: 3780 - protein, 9 aa, Homo sapiens
SGDPASSRL

SEQ ID NO: 3781 - protein, 9 aa, Homo sapiens
DPASSRLWG

SEQ ID NO: 3782 - protein, 9 aa, Homo sapiens
CCSGDPASS

SEQ ID NO: 3783 - protein, 9 aa, Homo sapiens
CSGDPASSR

SEQ ID NO: 3784 - protein, 9 aa, Homo sapiens
GDPASSRLW

SEQ ID NO: 3785 - protein, 9 aa, Homo sapiens
ASSRLWGAP

SEQ ID NO: 3786 - protein, 9 aa, Homo sapiens
PASSRLWGA

SEQ ID NO: 3787 - protein, 9 aa, Homo sapiens
SRLWGAPLQ

SEQ ID NO: 3788 - protein, 9 aa, Homo sapiens
DPAQWEPVL

SEQ ID NO: 3789 - protein, 9 aa, Homo sapiens
VPLLTDPAQ

SEQ ID NO: 3790 - protein, 9 aa, Homo sapiens
SVPLLTDPA

SEQ ID NO: 3791 - protein, 9 aa, Homo sapiens
PLLTDPAQW

SEQ ID NO: 3792 - protein, 9 aa, Homo sapiens
ASVPLLTDP

SEQ ID NO: 3793 - protein, 9 aa, Homo sapiens
QASVPLLTD

SEQ ID NO: 3794 - protein, 9 aa, Homo sapiens
LLTDPAQWE

SEQ ID NO: 3795 - protein, 9 aa, Homo sapiens
TDPAQWEPV

SEQ ID NO: 3796 - protein, 9 aa, Homo sapiens
LTDPAQWEP

SEQ ID NO: 3797 - protein, 9 aa, Homo sapiens
ASVPLLTDL

SEQ ID NO: 3798 - protein, 9 aa, Homo sapiens
DLAQWEPVL

SEQ ID NO: 3799 - protein, 9 aa, Homo sapiens
VPLLTDLAQ

SEQ ID NO: 3800 - protein, 9 aa, Homo sapiens
SVPLLTDLA

SEQ ID NO: 3801 - protein, 9 aa, Homo sapiens
PLLTDLAQW

SEQ ID NO: 3802 - protein, 9 aa, Homo sapiens
TDLAQWEPV

SEQ ID NO: 3803 - protein, 9 aa, Homo sapiens
LLTDLAQWE

SEQ ID NO: 3804 - protein, 9 aa, Homo sapiens
LTDLAQWEP

SEQ ID NO: 3805 - protein, 9 aa, Homo sapiens
ASVPLLTHL

SEQ ID NO: 3806 - protein, 9 aa, Homo sapiens
HLAQWEPVL

SEQ ID NO: 3807 - protein, 9 aa, Homo sapiens
LAQWEPVLV

SEQ ID NO: 3808 - protein, 9 aa, Homo sapiens
VPLLTHLAQ

SEQ ID NO: 3809 - protein, 9 aa, Homo sapiens
SVPLLTHLA

SEQ ID NO: 3810 - protein, 9 aa, Homo sapiens
PLLTHLAQW

SEQ ID NO: 3811 - protein, 9 aa, Homo sapiens
THLAQWEPV

SEQ ID NO: 3812 - protein, 9 aa, Homo sapiens
LTHLAQWEP

SEQ ID NO: 3813 - protein, 9 aa, Homo sapiens
LLTHLAQWE

SEQ ID NO: 3814 - protein, 9 aa, Homo sapiens
ASLTMYVCT

SEQ ID NO: 3815 - protein, 9 aa, Homo sapiens
LTMYVCTPV

SEQ ID NO: 3816 - protein, 9 aa, Homo sapiens
VCTPVPHPD

SEQ ID NO: 3817 - protein, 9 aa, Homo sapiens
YVCTPVPHP

SEQ ID NO: 3818 - protein, 9 aa, Homo sapiens
TMYVCTPVP

SEQ ID NO: 3819 - protein, 9 aa, Homo sapiens
CTPVPHPDP

SEQ ID NO: 3820 - protein, 9 aa, Homo sapiens
SLTMYVCTP

SEQ ID NO: 3821 - protein, 9 aa, Homo sapiens
MYVCTPVPH

SEQ ID NO: 3822 - protein, 9 aa, Homo sapiens
TPTRQISSI

SEQ ID NO: 3823 - protein, 9 aa, Homo sapiens
SSIDTDPPA

SEQ ID NO: 3824 - protein, 9 aa, Homo sapiens
RTPTRQISS

SEQ ID NO: 3825 - protein, 9 aa, Homo sapiens
ISSIDTDPP

SEQ ID NO: 3826 - protein, 9 aa, Homo sapiens
RQISSIDTD

SEQ ID NO: 3827 - protein, 9 aa, Homo sapiens
QISSIDTDP

SEQ ID NO: 3828 - protein, 9 aa, Homo sapiens
TRQISSIDT

SEQ ID NO: 3829 - protein, 9 aa, Homo sapiens
SRTPTRQIS

SEQ ID NO: 3830 - protein, 9 aa, Homo sapiens
PTRQISSID

SEQ ID NO: 3831 - protein, 9 aa, Homo sapiens
TPTRQISSS

SEQ ID NO: 3832 - protein, 9 aa, Homo sapiens
SSSDTDPPA

SEQ ID NO: 3833 - protein, 9 aa, Homo sapiens
ISSSDTDPP

SEQ ID NO: 3834 - protein, 9 aa, Homo sapiens
RQISSSDTD

SEQ ID NO: 3835 - protein, 9 aa, Homo sapiens
QISSSDTDP

SEQ ID NO: 3836 - protein, 9 aa, Homo sapiens
TRQISSSDT

SEQ ID NO: 3837 - protein, 9 aa, Homo sapiens
PTRQISSSD

SEQ ID NO: 3838 - protein, 9 aa, Homo sapiens
TPTRQIGSS

SEQ ID NO: 3839 - protein, 9 aa, Homo sapiens
GSSDTDPPA

SEQ ID NO: 3840 - protein, 9 aa, Homo sapiens
SSDTDPPAD

SEQ ID NO: 3841 - protein, 9 aa, Homo sapiens
RQIGSSDTD

SEQ ID NO: 3842 - protein, 9 aa, Homo sapiens
IGSSDTDPP

SEQ ID NO: 3843 - protein, 9 aa, Homo sapiens
QIGSSDTDP

SEQ ID NO: 3844 - protein, 9 aa, Homo sapiens
TRQIGSSDT

SEQ ID NO: 3845 - protein, 9 aa, Homo sapiens
PTRQIGSSD

SEQ ID NO: 3846 - protein, 9 aa, Homo sapiens
SDTDPPADG

SEQ ID NO: 3847 - protein, 9 aa, Homo sapiens
RGQALRRAQ

SEQ ID NO: 3848 - protein, 9 aa, Homo sapiens
SRGQALRRA

SEQ ID NO: 3849 - protein, 10 aa, Homo sapiens
QPAAAILALL

SEQ ID NO: 3850 - protein, 10 aa, Homo sapiens
TARIRAVGLL

SEQ ID NO: 3851 - protein, 10 aa, Homo sapiens
KAQVSNEDCL

SEQ ID NO: 3852 - protein, 10 aa, Homo sapiens
NCVDDSQDYY

SEQ ID NO: 3853 - protein, 10 aa, Homo sapiens
HALQPAAAIL

SEQ ID NO: 3854 - protein, 10 aa, Homo sapiens
LALLMAGLAL

SEQ ID NO: 3855 - protein, 10 aa, Homo sapiens
ISKGCSLNCV

SEQ ID NO: 3856 - protein, 10 aa, Homo sapiens
AAILALLPAL

SEQ ID NO: 3857 - protein, 10 aa, Homo sapiens
LALLPALGLL

SEQ ID NO: 3858 - protein, 10 aa, Homo sapiens
LALQPGTALL

SEQ ID NO: 3859 - protein, 10 aa, Homo sapiens
LNCVDDSQDY

SEQ ID NO: 3860 - protein, 10 aa, Homo sapiens
KNITCCDTDL

SEQ ID NO: 3861 - protein, 10 aa, Homo sapiens
QPGTALLCYS

SEQ ID NO: 3862 - protein, 10 aa, Homo sapiens
LQPGTALLCY

SEQ ID NO: 3863 - protein, 10 aa, Homo sapiens
RIRAVGLLTV

SEQ ID NO: 3864 - protein, 10 aa, Homo sapiens
LQPAAAILAL

SEQ ID NO: 3865 - protein, 10 aa, Homo sapiens
ALLPALGLLL

SEQ ID NO: 3866 - protein, 10 aa, Homo sapiens
GLLLWGPGQL

SEQ ID NO: 3867 - protein, 10 aa, Homo sapiens
LTVISKGCSL

SEQ ID NO: 3868 - protein, 10 aa, Homo sapiens
ILALLPALGL

SEQ ID NO: 3869 - protein, 10 aa, Homo sapiens
VLLALLMAGL

SEQ ID NO: 3870 - protein, 10 aa, Homo sapiens
WTARIRAVGL

SEQ ID NO: 3871 - protein, 10 aa, Homo sapiens
LCNASGAHAL

SEQ ID NO: 3872 - protein, 10 aa, Homo sapiens
GLALQPGTAL

SEQ ID NO: 3873 - protein, 10 aa, Homo sapiens
CLQVENCTQL

SEQ ID NO: 3874 - protein, 10 aa, Homo sapiens
RAVGLLTVIS

SEQ ID NO: 3875 - protein, 10 aa, Homo sapiens
KAVLLALLMA

SEQ ID NO: 3876 - protein, 10 aa, Homo sapiens
LLPALGLLLW

SEQ ID NO: 3877 - protein, 10 aa, Homo sapiens
ASGAHALQPA

SEQ ID NO: 3878 - protein, 10 aa, Homo sapiens
NCTQLGEQCW

SEQ ID NO: 3879 - protein, 10 aa, Homo sapiens
MAGLALQPGT

SEQ ID NO: 3880 - protein, 10 aa, Homo sapiens
TALLCYSCKA

SEQ ID NO: 3881 - protein, 10 aa, Homo sapiens
GAHALQPAAA

SEQ ID NO: 3882 - protein, 10 aa, Homo sapiens
AAAILALLPA

SEQ ID NO: 3883 - protein, 10 aa, Homo sapiens
TCCDTDLCNA

SEQ ID NO: 3884 - protein, 10 aa, Homo sapiens
QVSNEDCLQV

SEQ ID NO: 3885 - protein, 10 aa, Homo sapiens
LLCYSCKAQV

SEQ ID NO: 3886 - protein, 10 aa, Homo sapiens
MKAVLLALLM

SEQ ID NO: 3887 - protein, 10 aa, Homo sapiens
QCWTARIRAV

SEQ ID NO: 3888 - protein, 10 aa, Homo sapiens
LPALGLLLWG

SEQ ID NO: 3889 - protein, 10 aa, Homo sapiens
CTQLGEQCWT

SEQ ID NO: 3890 - protein, 10 aa, Homo sapiens
NITCCDTDLC

SEQ ID NO: 3891 - protein, 10 aa, Homo sapiens
LGEQCWTARI

SEQ ID NO: 3892 - protein, 10 aa, Homo sapiens
CVDDSQDYYV

SEQ ID NO: 3893 - protein, 10 aa, Homo sapiens
ALQPGTALLC

SEQ ID NO: 3894 - protein, 10 aa, Homo sapiens
LLTVISKGCS

SEQ ID NO: 3895 - protein, 10 aa, Homo sapiens
DSQDYYVGKK

SEQ ID NO: 3896 - protein, 10 aa, Homo sapiens
LLALLMAGLA

SEQ ID NO: 3897 - protein, 10 aa, Homo sapiens
TQLGEQCWTA

SEQ ID NO: 3898 - protein, 10 aa, Homo sapiens
ITCCDTDLCN

SEQ ID NO: 3899 - protein, 10 aa, Homo sapiens
VISKGCSLNC

SEQ ID NO: 3900 - protein, 10 aa, Homo sapiens
GCSLNCVDDS

SEQ ID NO: 3901 - protein, 10 aa, Homo sapiens
LCYSCKAQVS

SEQ ID NO: 3902 - protein, 10 aa, Homo sapiens
SGAHALQPAA

SEQ ID NO: 3903 - protein, 10 aa, Homo sapiens
YVGKKNITCC

SEQ ID NO: 3904 - protein, 10 aa, Homo sapiens
DLCNASGAHA

SEQ ID NO: 3905 - protein, 10 aa, Homo sapiens
EQCWTARIRA

SEQ ID NO: 3906 - protein, 10 aa, Homo sapiens
VSNEDCLQVE

SEQ ID NO: 3907 - protein, 10 aa, Homo sapiens
ALQPAAAILA

SEQ ID NO: 3908 - protein, 10 aa, Homo sapiens
GLLTVISKGC

SEQ ID NO: 3909 - protein, 10 aa, Homo sapiens
TVISKGCSLN

SEQ ID NO: 3910 - protein, 10 aa, Homo sapiens
ENCTQLGEQC

SEQ ID NO: 3911 - protein, 10 aa, Homo sapiens
AGLALQPGTA

SEQ ID NO: 3912 - protein, 10 aa, Homo sapiens
SNEDCLQVEN

SEQ ID NO: 3913 - protein, 10 aa, Homo sapiens
YSCKAQVSNE

SEQ ID NO: 3914 - protein, 10 aa, Homo sapiens
CSLNCVDDSQ

SEQ ID NO: 3915 - protein, 10 aa, Homo sapiens
AHALQPAAAI

SEQ ID NO: 3916 - protein, 10 aa, Homo sapiens
QDYYVGKKNI

SEQ ID NO: 3917 - protein, 10 aa, Homo sapiens
IRAVGLLTVI

SEQ ID NO: 3918 - protein, 10 aa, Homo sapiens
SCKAQVSNED

SEQ ID NO: 3919 - protein, 10 aa, Homo sapiens
VGKKNITCCD

SEQ ID NO: 3920 - protein, 10 aa, Homo sapiens
NASGAHALQP

SEQ ID NO: 3921 - protein, 10 aa, Homo sapiens
GKKNITCCDT

SEQ ID NO: 3922 - protein, 10 aa, Homo sapiens
SQDYYVGKKN

SEQ ID NO: 3923 - protein, 10 aa, Homo sapiens
CCDTDLCNAS

SEQ ID NO: 3924 - protein, 10 aa, Homo sapiens
DTDLCNASGA

SEQ ID NO: 3925 - protein, 10 aa, Homo sapiens
LQVENCTQLG

SEQ ID NO: 3926 - protein, 10 aa, Homo sapiens
KGCSLNCVDD

SEQ ID NO: 3927 - protein, 10 aa, Homo sapiens
QLGEQCWTAR

SEQ ID NO: 3928 - protein, 10 aa, Homo sapiens
AQVSNEDCLQ

SEQ ID NO: 3929 - protein, 10 aa, Homo sapiens
DCLQVENCTQ

SEQ ID NO: 3930 - protein, 10 aa, Homo sapiens
SLNCVDDSQD

SEQ ID NO: 3931 - protein, 10 aa, Homo sapiens
AILALLPALG

SEQ ID NO: 3932 - protein, 10 aa, Homo sapiens
DYYVGKKNIT

SEQ ID NO: 3933 - protein, 10 aa, Homo sapiens
EDCLQVENCT

SEQ ID NO: 3934 - protein, 10 aa, Homo sapiens
CKAQVSNEDC

SEQ ID NO: 3935 - protein, 10 aa, Homo sapiens
VGLLTVISKG

SEQ ID NO: 3936 - protein, 10 aa, Homo sapiens
ALGLLLWGPG

SEQ ID NO: 3937 - protein, 10 aa, Homo sapiens
AVLLALLMAG

SEQ ID NO: 3938 - protein, 10 aa, Homo sapiens
AVGLLTVISK

SEQ ID NO: 3939 - protein, 10 aa, Homo sapiens
LMAGLALQPG

SEQ ID NO: 3940 - protein, 10 aa, Homo sapiens
ARIRAVGLLT

SEQ ID NO: 3941 - protein, 10 aa, Homo sapiens
ALLCYSCKAQ

SEQ ID NO: 3942 - protein, 10 aa, Homo sapiens
CNASGAHALQ

SEQ ID NO: 3943 - protein, 10 aa, Homo sapiens
LLMAGLALQP

SEQ ID NO: 3944 - protein, 10 aa, Homo sapiens
LGLLLWGPGQ

SEQ ID NO: 3945 - protein, 10 aa, Homo sapiens
GTALLCYSCK

SEQ ID NO: 3946 - protein, 10 aa, Homo sapiens
ALLMAGLALQ

SEQ ID NO: 3947 - protein, 10 aa, Homo sapiens
YYVGKKNITC

SEQ ID NO: 3948 - protein, 10 aa, Homo sapiens
CYSCKAQVSN

SEQ ID NO: 3949 - protein, 10 aa, Homo sapiens
APVPHPDPPM

SEQ ID NO: 3950 - protein, 10 aa, Homo sapiens
GPSNPLCCCF

SEQ ID NO: 3951 - protein, 10 aa, Homo sapiens
SPAPSRGQAL

SEQ ID NO: 3952 - protein, 10 aa, Homo sapiens
MPCSRLPPSL

SEQ ID NO: 3953 - protein, 10 aa, Homo sapiens
VPHPDPPMAL

SEQ ID NO: 3954 - protein, 10 aa, Homo sapiens
CSGDPASYRL

SEQ ID NO: 3955 - protein, 10 aa, Homo sapiens
HPIYDLSQVW

SEQ ID NO: 3956 - protein, 10 aa, Homo sapiens
VPLLTHPAQW

SEQ ID NO: 3957 - protein, 10 aa, Homo sapiens
VPEAHPNASL

SEQ ID NO: 3958 - protein, 10 aa, Homo sapiens
EAHPNASLTM

SEQ ID NO: 3959 - protein, 10 aa, Homo sapiens
HPAQWEPVLV

SEQ ID NO: 3960 - protein, 10 aa, Homo sapiens
ASYRLWGAPL

SEQ ID NO: 3961 - protein, 10 aa, Homo sapiens
GPAFSTLNPV

SEQ ID NO: 3962 - protein, 10 aa, Homo sapiens
APLQPTLGVV

SEQ ID NO: 3963 - protein, 10 aa, Homo sapiens
HPNASLTMYV

SEQ ID NO: 3964 - protein, 10 aa, Homo sapiens
PPADGPSNPL

SEQ ID NO: 3965 - protein, 10 aa, Homo sapiens
ACCSGDPASY

SEQ ID NO: 3966 - protein, 10 aa, Homo sapiens
QPTLGVVPQA

SEQ ID NO: 3967 - protein, 10 aa, Homo sapiens
VPQASVPLLT

SEQ ID NO: 3968 - protein, 10 aa, Homo sapiens
RLPPSLRCSL

SEQ ID NO: 3969 - protein, 10 aa, Homo sapiens
FPAHPIYDLS

SEQ ID NO: 3970 - protein, 10 aa, Homo sapiens
DPASYRLWGA

SEQ ID NO: 3971 - protein, 10 aa, Homo sapiens
TSRAVTPTCA

SEQ ID NO: 3972 - protein, 10 aa, Homo sapiens
CSRLPPSLRC

SEQ ID NO: 3973 - protein, 10 aa, Homo sapiens
LCCCFHGPAF

SEQ ID NO: 3974 - protein, 10 aa, Homo sapiens
VVPQASVPLL

SEQ ID NO: 3975 - protein, 10 aa, Homo sapiens
TLNPVLRHLF

SEQ ID NO: 3976 - protein, 10 aa, Homo sapiens
GVVPQASVPL

SEQ ID NO: 3977 - protein, 10 aa, Homo sapiens
STLNPVLRHL

SEQ ID NO: 3978 - protein, 10 aa, Homo sapiens
WARRTSRAVT

SEQ ID NO: 3979 - protein, 10 aa, Homo sapiens
RTPTRQIGSI

SEQ ID NO: 3980 - protein, 10 aa, Homo sapiens
GAPLQPTLGV

SEQ ID NO: 3981 - protein, 10 aa, Homo sapiens
ASVPLLTHPA

SEQ ID NO: 3982 - protein, 10 aa, Homo sapiens
VSPAPSRGQA

SEQ ID NO: 3983 - protein, 10 aa, Homo sapiens
HSACCSGDPA

SEQ ID NO: 3984 - protein, 10 aa, Homo sapiens
FPQEAFPAHP

SEQ ID NO: 3985 - protein, 10 aa, Homo sapiens
ALSRTPTRQI

SEQ ID NO: 3986 - protein, 10 aa, Homo sapiens
SLRCSLHSAC

SEQ ID NO: 3987 - protein, 10 aa, Homo sapiens
CATPAGPMPC

SEQ ID NO: 3988 - protein, 10 aa, Homo sapiens
NASLTMYVCA

SEQ ID NO: 3989 - protein, 10 aa, Homo sapiens
PAFSTLNPVL

SEQ ID NO: 3990 - protein, 10 aa, Homo sapiens
VLRHLFPQEA

SEQ ID NO: 3991 - protein, 10 aa, Homo sapiens
SACCSGDPAS

SEQ ID NO: 3992 - protein, 10 aa, Homo sapiens
PAGPMPCSRL

SEQ ID NO: 3993 - protein, 10 aa, Homo sapiens
RLWGAPLQPT

SEQ ID NO: 3994 - protein, 10 aa, Homo sapiens
LPPSLRCSLH

SEQ ID NO: 3995 - protein, 10 aa, Homo sapiens
DPPADGPSNP

SEQ ID NO: 3996 - protein, 10 aa, Homo sapiens
LTHPAQWEPV

SEQ ID NO: 3997 - protein, 10 aa, Homo sapiens
RTSRAVTPTC

SEQ ID NO: 3998 - protein, 10 aa, Homo sapiens
NPVLRHLFPQ

SEQ ID NO: 3999 - protein, 10 aa, Homo sapiens
PTCATPAGPM

SEQ ID NO: 4000 - protein, 10 aa, Homo sapiens
EPVLVPEAHP

SEQ ID NO: 4001 - protein, 10 aa, Homo sapiens
LVPEAHPNAS

SEQ ID NO: 4002 - protein, 10 aa, Homo sapiens
DPPMALSRTP

SEQ ID NO: 4003 - protein, 10 aa, Homo sapiens
GPMPCSRLPP

SEQ ID NO: 4004 - protein, 10 aa, Homo sapiens
PPSLRCSLHS

SEQ ID NO: 4005 - protein, 10 aa, Homo sapiens
APSRGQALRR

SEQ ID NO: 4006 - protein, 10 aa, Homo sapiens
TPAGPMPCSR

SEQ ID NO: 4007 - protein, 10 aa, Homo sapiens
RTTTWARRTS

SEQ ID NO: 4008 - protein, 10 aa, Homo sapiens
TPTCATPAGP

SEQ ID NO: 4009 - protein, 10 aa, Homo sapiens
SLTMYVCAPV

SEQ ID NO: 4010 - protein, 10 aa, Homo sapiens
RCSLHSACCS

SEQ ID NO: 4011 - protein, 10 aa, Homo sapiens
NPLCCCFHGP

SEQ ID NO: 4012 - protein, 10 aa, Homo sapiens
TLGVVPQASV

SEQ ID NO: 4013 - protein, 10 aa, Homo sapiens
QEAFPAHPIY

SEQ ID NO: 4014 - protein, 10 aa, Homo sapiens
AHPNASLTMY

SEQ ID NO: 4015 - protein, 10 aa, Homo sapiens
PPMALSRTPT

SEQ ID NO: 4016 - protein, 10 aa, Homo sapiens
TPTRQIGSID

SEQ ID NO: 4017 - protein, 10 aa, Homo sapiens
GSIDTDPPAD

SEQ ID NO: 4018 - protein, 10 aa, Homo sapiens
SGDPASYRLW

SEQ ID NO: 4019 - protein, 10 aa, Homo sapiens
LSRTPTRQIG

SEQ ID NO: 4020 - protein, 10 aa, Homo sapiens
HLFPQEAFPA

SEQ ID NO: 4021 - protein, 10 aa, Homo sapiens
PSRGQALRRA

SEQ ID NO: 4022 - protein, 10 aa, Homo sapiens
AVTPTCATPA

SEQ ID NO: 4023 - protein, 10 aa, Homo sapiens
IGSIDTDPPA

SEQ ID NO: 4024 - protein, 10 aa, Homo sapiens
VLVPEAHPNA

SEQ ID NO: 4025 - protein, 10 aa, Homo sapiens
TTWARRTSRA

SEQ ID NO: 4026 - protein, 10 aa, Homo sapiens
LRHLFPQEAF

SEQ ID NO: 4027 - protein, 10 aa, Homo sapiens
LWGAPLQPTL

SEQ ID NO: 4028 - protein, 10 aa, Homo sapiens
DGPSNPLCCC

SEQ ID NO: 4029 - protein, 10 aa, Homo sapiens
ATPAGPMPCS

SEQ ID NO: 4030 - protein, 10 aa, Homo sapiens
DLSQVWSVVS

SEQ ID NO: 4031 - protein, 10 aa, Homo sapiens
CFHGPAFSTL

SEQ ID NO: 4032 - protein, 10 aa, Homo sapiens
AFPAHPIYDL

SEQ ID NO: 4033 - protein, 10 aa, Homo sapiens
SQVWSVVSPA

SEQ ID NO: 4034 - protein, 10 aa, Homo sapiens
THPAQWEPVL

SEQ ID NO: 4035 - protein, 10 aa, Homo sapiens
CCCFHGPAFS

SEQ ID NO: 4036 - protein, 10 aa, Homo sapiens
CCFHGPAFST

SEQ ID NO: 4037 - protein, 10 aa, Homo sapiens
HPDPPMALSR

SEQ ID NO: 4038 - protein, 10 aa, Homo sapiens
RAVTPTCATP

SEQ ID NO: 4039 - protein, 10 aa, Homo sapiens
CSLHSACCSG

SEQ ID NO: 4040 - protein, 10 aa, Homo sapiens
WSVVSPAPSR

SEQ ID NO: 4041 - protein, 10 aa, Homo sapiens
ASLTMYVCAP

SEQ ID NO: 4042 - protein, 10 aa, Homo sapiens
FSTLNPVLRH

SEQ ID NO: 4043 - protein, 10 aa, Homo sapiens
LSQVWSVVSP

SEQ ID NO: 4044 - protein, 10 aa, Homo sapiens
PSLRCSLHSA

SEQ ID NO: 4045 - protein, 10 aa, Homo sapiens
EAFPAHPIYD

SEQ ID NO: 4046 - protein, 10 aa, Homo sapiens
AHPIYDLSQV

SEQ ID NO: 4047 - protein, 10 aa, Homo sapiens
CAPVPHPDPP

SEQ ID NO: 4048 - protein, 10 aa, Homo sapiens
QASVPLLTHP

SEQ ID NO: 4049 - protein, 10 aa, Homo sapiens
MPCSRLLPSL

SEQ ID NO: 4050 - protein, 10 aa, Homo sapiens
RLLPSLRCSL

SEQ ID NO: 4051 - protein, 10 aa, Homo sapiens
LPSLRCSLHS

SEQ ID NO: 4052 - protein, 10 aa, Homo sapiens
CSRLLPSLRC

SEQ ID NO: 4053 - protein, 10 aa, Homo sapiens
AGPMPCSRLL

SEQ ID NO: 4054 - protein, 10 aa, Homo sapiens
GPMPCSRLLP

SEQ ID NO: 4055 - protein, 10 aa, Homo sapiens
SRLLPSLRCS

SEQ ID NO: 4056 - protein, 10 aa, Homo sapiens
PMPCSRLLPS

SEQ ID NO: 4057 - protein, 10 aa, Homo sapiens
LLPSLRCSLH

SEQ ID NO: 4058 - protein, 10 aa, Homo sapiens
PCSRLLPSLR

SEQ ID NO: 4059 - protein, 10 aa, Homo sapiens
CSGDPASSRL

SEQ ID NO: 4060 - protein, 10 aa, Homo sapiens
ASSRLWGAPL

SEQ ID NO: 4061 - protein, 10 aa, Homo sapiens
DPASSRLWGA

SEQ ID NO: 4062 - protein, 10 aa, Homo sapiens
SSRLWGAPLQ

SEQ ID NO: 4063 - protein, 10 aa, Homo sapiens
ACCSGDPASS

SEQ ID NO: 4064 - protein, 10 aa, Homo sapiens
SGDPASSRLW

SEQ ID NO: 4065 - protein, 10 aa, Homo sapiens
CCSGDPASSR

SEQ ID NO: 4066 - protein, 10 aa, Homo sapiens
PASSRLWGAP

SEQ ID NO: 4067 - protein, 10 aa, Homo sapiens
SRLWGAPLQP

SEQ ID NO: 4068 - protein, 10 aa, Homo sapiens
GDPASSRLWG

SEQ ID NO: 4069 - protein, 10 aa, Homo sapiens
VPLLTDPAQW

SEQ ID NO: 4070 - protein, 10 aa, Homo sapiens
DPAQWEPVLV

SEQ ID NO: 4071 - protein, 10 aa, Homo sapiens
ASVPLLTDPA

SEQ ID NO: 4072 - protein, 10 aa, Homo sapiens
TDPAQWEPVL

SEQ ID NO: 4073 - protein, 10 aa, Homo sapiens
LTDPAQWEPV

SEQ ID NO: 4074 - protein, 10 aa, Homo sapiens
QASVPLLTDP

SEQ ID NO: 4075 - protein, 10 aa, Homo sapiens
LLTDPAQWEP

SEQ ID NO: 4076 - protein, 10 aa, Homo sapiens
SVPLLTDPAQ

SEQ ID NO: 4077 - protein, 10 aa, Homo sapiens
PLLTDPAQWE

SEQ ID NO: 4078 - protein, 10 aa, Homo sapiens
PQASVPLLTD

SEQ ID NO: 4079 - protein, 10 aa, Homo sapiens
VPLLTDLAQW

SEQ ID NO: 4080 - protein, 10 aa, Homo sapiens
QASVPLLTDL

SEQ ID NO: 4081 - protein, 10 aa, Homo sapiens
ASVPLLTDLA

SEQ ID NO: 4082 - protein, 10 aa, Homo sapiens
DLAQWEPVLV

SEQ ID NO: 4083 - protein, 10 aa, Homo sapiens
TDLAQWEPVL

SEQ ID NO: 4084 - protein, 10 aa, Homo sapiens
LTDLAQWEPV

SEQ ID NO: 4085 - protein, 10 aa, Homo sapiens
LLTDLAQWEP

SEQ ID NO: 4086 - protein, 10 aa, Homo sapiens
SVPLLTDLAQ

SEQ ID NO: 4087 - protein, 10 aa, Homo sapiens
PLLTDLAQWE

SEQ ID NO: 4088 - protein, 10 aa, Homo sapiens
VPLLTHLAQW

SEQ ID NO: 4089 - protein, 10 aa, Homo sapiens
QASVPLLTHL

SEQ ID NO: 4090 - protein, 10 aa, Homo sapiens
ASVPLLTHLA

SEQ ID NO: 4091 - protein, 10 aa, Homo sapiens
HLAQWEPVLV

SEQ ID NO: 4092 - protein, 10 aa, Homo sapiens
LTHLAQWEPV

SEQ ID NO: 4093 - protein, 10 aa, Homo sapiens
THLAQWEPVL

SEQ ID NO: 4094 - protein, 10 aa, Homo sapiens
LAQWEPVLVP

SEQ ID NO: 4095 - protein, 10 aa, Homo sapiens
SVPLLTHLAQ

SEQ ID NO: 4096 - protein, 10 aa, Homo sapiens
LLTHLAQWEP

SEQ ID NO: 4097 - protein, 10 aa, Homo sapiens
PLLTHLAQWE

SEQ ID NO: 4098 - protein, 10 aa, Homo sapiens
TPVPHPDPPM

SEQ ID NO: 4099 - protein, 10 aa, Homo sapiens
NASLTMYVCT

SEQ ID NO: 4100 - protein, 10 aa, Homo sapiens
SLTMYVCTPV

SEQ ID NO: 4101 - protein, 10 aa, Homo sapiens
ASLTMYVCTP

SEQ ID NO: 4102 - protein, 10 aa, Homo sapiens
YVCTPVPHPD

SEQ ID NO: 4103 - protein, 10 aa, Homo sapiens
VCTPVPHPDP

SEQ ID NO: 4104 - protein, 10 aa, Homo sapiens
LTMYVCTPVP

SEQ ID NO: 4105 - protein, 10 aa, Homo sapiens
CTPVPHPDPP

SEQ ID NO: 4106 - protein, 10 aa, Homo sapiens
TMYVCTPVPH

SEQ ID NO: 4107 - protein, 10 aa, Homo sapiens
MYVCTPVPHP

SEQ ID NO: 4108 - protein, 10 aa, Homo sapiens
LSRTPTRQIS

SEQ ID NO: 4109 - protein, 10 aa, Homo sapiens
RTPTRQISSI

SEQ ID NO: 4110 - protein, 10 aa, Homo sapiens
ISSIDTDPPA

SEQ ID NO: 4111 - protein, 10 aa, Homo sapiens
TPTRQISSID

SEQ ID NO: 4112 - protein, 10 aa, Homo sapiens
SSIDTDPPAD

SEQ ID NO: 4113 - protein, 10 aa, Homo sapiens
PTRQISSIDT

SEQ ID NO: 4114 - protein, 10 aa, Homo sapiens
RQISSIDTDP

SEQ ID NO: 4115 - protein, 10 aa, Homo sapiens
QISSIDTDPP

SEQ ID NO: 4116 - protein, 10 aa, Homo sapiens
SRTPTRQISS

SEQ ID NO: 4117 - protein, 10 aa, Homo sapiens
TRQISSIDTD

SEQ ID NO: 4118 - protein, 10 aa, Homo sapiens
ISSSDTDPPA

SEQ ID NO: 4119 - protein, 10 aa, Homo sapiens
RTPTRQISSS

SEQ ID NO: 4120 - protein, 10 aa, Homo sapiens
TPTRQISSSD

SEQ ID NO: 4121 - protein, 10 aa, Homo sapiens
SSSDTDPPAD

SEQ ID NO: 4122 - protein, 10 aa, Homo sapiens
PTRQISSSDT

SEQ ID NO: 4123 - protein, 10 aa, Homo sapiens
RQISSSDTDP

SEQ ID NO: 4124 - protein, 10 aa, Homo sapiens
QISSSDTDPP

SEQ ID NO: 4125 - protein, 10 aa, Homo sapiens
TRQISSSDTD

SEQ ID NO: 4126 - protein, 10 aa, Homo sapiens
RTPTRQIGSS

SEQ ID NO: 4127 - protein, 10 aa, Homo sapiens
TPTRQIGSSD

SEQ ID NO: 4128 - protein, 10 aa, Homo sapiens
GSSDTDPPAD

SEQ ID NO: 4129 - protein, 10 aa, Homo sapiens
IGSSDTDPPA

SEQ ID NO: 4130 - protein, 10 aa, Homo sapiens
PTRQIGSSDT

SEQ ID NO: 4131 - protein, 10 aa, Homo sapiens
RQIGSSDTDP

SEQ ID NO: 4132 - protein, 10 aa, Homo sapiens
SSDTDPPADG

SEQ ID NO: 4133 - protein, 10 aa, Homo sapiens
QIGSSDTDPP

SEQ ID NO: 4134 - protein, 10 aa, Homo sapiens
SDTDPPADGP

SEQ ID NO: 4135 - protein, 10 aa, Homo sapiens
TRQIGSSDTD

SEQ ID NO: 4136 - protein, 10 aa, Homo sapiens
PSRGQALRRA

SEQ ID NO: 4137 - protein, 10 aa, Homo sapiens
SRGQALRRAQ

SEQ ID NO: 4138 - protein, 9 aa, Homo sapiens
CVDDSQDYY

SEQ ID NO: 4139 - protein, 9 aa, Homo sapiens
QPGTALLCY

SEQ ID NO: 4140 - protein, 9 aa, Homo sapiens
DTDLCNASG

SEQ ID NO: 4141 - protein, 9 aa, Homo sapiens
SQDYYVGKK

SEQ ID NO: 4142 - protein, 9 aa, Homo sapiens
NCVDDSQDY

SEQ ID NO: 4143 - protein, 9 aa, Homo sapiens
SNEDCLQVE

SEQ ID NO: 4144 - protein, 9 aa, Homo sapiens
VDDSQDYYV

SEQ ID NO: 4145 - protein, 9 aa, Homo sapiens
QVENCTQLG

SEQ ID NO: 4146 - protein, 9 aa, Homo sapiens
DTDPPADGP

SEQ ID NO: 4147 - protein, 9 aa, Homo sapiens
EAFPAHPIY

SEQ ID NO: 4148 - protein, 9 aa, Homo sapiens
HPDPPMALS

SEQ ID NO: 4149 - protein, 9 aa, Homo sapiens
CCSGDPASY

SEQ ID NO: 4150 - protein, 9 aa, Homo sapiens
SGDPASYRL

SEQ ID NO: 4151 - protein, 9 aa, Homo sapiens
QWEPVLVPE

SEQ ID NO: 4152 - protein, 9 aa, Homo sapiens
HPNASLTMY

SEQ ID NO: 4153 - protein, 9 aa, Homo sapiens
STLNPVLRH

SEQ ID NO: 4154 - protein, 9 aa, Homo sapiens
SRLPPSLRC

SEQ ID NO: 4155 - protein, 9 aa, Homo sapiens
PSRGQALRR

SEQ ID NO: 4156 - protein, 9 aa, Homo sapiens
SIDTDPPAD

SEQ ID NO: 4157 - protein, 9 aa, Homo sapiens
PADGPSNPL

SEQ ID NO: 4158 - protein, 9 aa, Homo sapiens
VPEAHPNAS

SEQ ID NO: 4159 - protein, 9 aa, Homo sapiens
PSLRCSLHS

SEQ ID NO: 4160 - protein, 9 aa, Homo sapiens
PTLGVVPQA

SEQ ID NO: 4161 - protein, 9 aa, Homo sapiens
PQASVPLLT

SEQ ID NO: 4162 - protein, 9 aa, Homo sapiens
LTHPAQWEP

SEQ ID NO: 4163 - protein, 9 aa, Homo sapiens
AQWEPVLVP

SEQ ID NO: 4164 - protein, 9 aa, Homo sapiens
PDPPMALSR

SEQ ID NO: 4165 - protein, 9 aa, Homo sapiens
RTPTRQIGS

SEQ ID NO: 4166 - protein, 9 aa, Homo sapiens
PQEAFPAHP

SEQ ID NO: 4167 - protein, 9 aa, Homo sapiens
IYDLSQVWS

SEQ ID NO: 4168 - protein, 9 aa, Homo sapiens
PMPCSRLLP

SEQ ID NO: 4169 - protein, 9 aa, Homo sapiens
SRLLPSLRC

SEQ ID NO: 4170 - protein, 9 aa, Homo sapiens
GPMPCSRLL

SEQ ID NO: 4171 - protein, 9 aa, Homo sapiens
MPCSRLLPS

SEQ ID NO: 4172 - protein, 9 aa, Homo sapiens
CSRLLPSLR

SEQ ID NO: 4173 - protein, 9 aa, Homo sapiens
RLLPSLRCS

SEQ ID NO: 4174 - protein, 9 aa, Homo sapiens
SGDPASSRL

SEQ ID NO: 4175 - protein, 9 aa, Homo sapiens
DPASSRLWG

SEQ ID NO: 4176 - protein, 9 aa, Homo sapiens
SSRLWGAPL

SEQ ID NO: 4177 - protein, 9 aa, Homo sapiens
LTDPAQWEP

SEQ ID NO: 4178 - protein, 9 aa, Homo sapiens
ASVPLLTDP

SEQ ID NO: 4179 - protein, 9 aa, Homo sapiens
LTDLAQWEP

SEQ ID NO: 4180 - protein, 9 aa, Homo sapiens
ASVPLLTDL

SEQ ID NO: 4181 - protein, 9 aa, Homo sapiens
VPLLTDLAQ

SEQ ID NO: 4182 - protein, 9 aa, Homo sapiens
ASVPLLTHL

SEQ ID NO: 4183 - protein, 9 aa, Homo sapiens
VPLLTHLAQ

SEQ ID NO: 4184 - protein, 9 aa, Homo sapiens
LTHLAQWEP

SEQ ID NO: 4185 - protein, 9 aa, Homo sapiens
SVPLLTHLA

SEQ ID NO: 4186 - protein, 9 aa, Homo sapiens
LTMYVCTPV

SEQ ID NO: 4187 - protein, 9 aa, Homo sapiens
VCTPVPHPD

SEQ ID NO: 4188 - protein, 9 aa, Homo sapiens
CTPVPHPDP

SEQ ID NO: 4189 - protein, 9 aa, Homo sapiens
ASLTMYVCT

SEQ ID NO: 4190 - protein, 9 aa, Homo sapiens
SLTMYVCTP

SEQ ID NO: 4191 - protein, 9 aa, Homo sapiens
YVCTPVPHP

SEQ ID NO: 4192 - protein, 9 aa, Homo sapiens
RTPTRQISS

SEQ ID NO: 4193 - protein, 9 aa, Homo sapiens
SRTPTRQIS

SEQ ID NO: 4194 - protein, 9 aa, Homo sapiens
PTRQISSID

SEQ ID NO: 4195 - protein, 9 aa, Homo sapiens
SSIDTDPPA

SEQ ID NO: 4196 - protein, 9 aa, Homo sapiens
TRQISSIDT

SEQ ID NO: 4197 - protein, 9 aa, Homo sapiens
ISSIDTDPP

SEQ ID NO: 4198 - protein, 9 aa, Homo sapiens
PTRQISSSD

SEQ ID NO: 4199 - protein, 9 aa, Homo sapiens
SSSDTDPPA

SEQ ID NO: 4200 - protein, 9 aa, Homo sapiens
ISSSDTDPP

SEQ ID NO: 4201 - protein, 9 aa, Homo sapiens
TPTRQISSS

SEQ ID NO: 4202 - protein, 9 aa, Homo sapiens
SSDTDPPAD

SEQ ID NO: 4203 - protein, 9 aa, Homo sapiens
PTRQIGSSD

SEQ ID NO: 4204 - protein, 9 aa, Homo sapiens
SRGQALRRA

SEQ ID NO: 4205 - protein, 9 aa, Homo sapiens
RGQALRRAQ

SEQ ID NO: 4206 - protein, 9 aa, Homo sapiens
ALQPGTALL

SEQ ID NO: 4207 - protein, 9 aa, Homo sapiens
ALLPALGLL

SEQ ID NO: 4208 - protein, 9 aa, Homo sapiens
AILALLPAL

SEQ ID NO: 4209 - protein, 9 aa, Homo sapiens
LLALLMAGL

SEQ ID NO: 4210 - protein, 9 aa, Homo sapiens
ALLMAGLAL

SEQ ID NO: 4211 - protein, 9 aa, Homo sapiens
ALQPAAAIL

SEQ ID NO: 4212 - protein, 9 aa, Homo sapiens
LLLWGPGQL

SEQ ID NO: 4213 - protein, 9 aa, Homo sapiens
LLPALGLLL

SEQ ID NO: 4214 - protein, 9 aa, Homo sapiens
IRAVGLLTV

SEQ ID NO: 4215 - protein, 9 aa, Homo sapiens
LLMAGLALQ

SEQ ID NO: 4216 - protein, 9 aa, Homo sapiens
ALLCYSCKA

SEQ ID NO: 4217 - protein, 9 aa, Homo sapiens
LALLPALGL

SEQ ID NO: 4218 - protein, 9 aa, Homo sapiens
LALQPGTAL

SEQ ID NO: 4219 - protein, 9 aa, Homo sapiens
MKAVLLALL

SEQ ID NO: 4220 - protein, 9 aa, Homo sapiens
VLLALLMAG

SEQ ID NO: 4221 - protein, 9 aa, Homo sapiens
GLALQPGTA

SEQ ID NO: 4222 - protein, 9 aa, Homo sapiens
RAVGLLTVI

SEQ ID NO: 4223 - protein, 9 aa, Homo sapiens
GLLTVISKG

SEQ ID NO: 4224 - protein, 9 aa, Homo sapiens
TVISKGCSL

SEQ ID NO: 4225 - protein, 9 aa, Homo sapiens
PAAAILALL

SEQ ID NO: 4226 - protein, 9 aa, Homo sapiens
QLGEQCWTA

SEQ ID NO: 4227 - protein, 9 aa, Homo sapiens
ARIRAVGLL

SEQ ID NO: 4228 - protein, 9 aa, Homo sapiens
HALQPAAAI

SEQ ID NO: 4229 - protein, 9 aa, Homo sapiens
QPAAAILAL

SEQ ID NO: 4230 - protein, 9 aa, Homo sapiens
ALGLLLWGP

SEQ ID NO: 4231 - protein, 9 aa, Homo sapiens
AVLLALLMA

SEQ ID NO: 4232 - protein, 9 aa, Homo sapiens
TARIRAVGL

SEQ ID NO: 4233 - protein, 9 aa, Homo sapiens
SKGCSLNCV

SEQ ID NO: 4234 - protein, 9 aa, Homo sapiens
NITCCDTDL

SEQ ID NO: 4235 - protein, 9 aa, Homo sapiens
AAILALLPA

SEQ ID NO: 4236 - protein, 9 aa, Homo sapiens
ILALLPALG

SEQ ID NO: 4237 - protein, 9 aa, Homo sapiens
LMAGLALQP

SEQ ID NO: 4238 - protein, 9 aa, Homo sapiens
CNASGAHAL

SEQ ID NO: 4239 - protein, 9 aa, Homo sapiens
LCYSCKAQV

SEQ ID NO: 4240 - protein, 9 aa, Homo sapiens
VSNEDCLQV

SEQ ID NO: 4241 - protein, 9 aa, Homo sapiens
SLNCVDDSQ

SEQ ID NO: 4242 - protein, 9 aa, Homo sapiens
GLLLWGPGQ

SEQ ID NO: 4243 - protein, 9 aa, Homo sapiens
LQVENCTQL

SEQ ID NO: 4244 - protein, 9 aa, Homo sapiens
CWTARIRAV

SEQ ID NO: 4245 - protein, 9 aa, Homo sapiens
SGDPASYRL

SEQ ID NO: 4246 - protein, 9 aa, Homo sapiens
PADGPSNPL

SEQ ID NO: 4247 - protein, 9 aa, Homo sapiens
FHGPAFSTL

SEQ ID NO: 4248 - protein, 9 aa, Homo sapiens
HLFPQEAFP

SEQ ID NO: 4249 - protein, 9 aa, Homo sapiens
HPIYDLSQV

SEQ ID NO: 4250 - protein, 9 aa, Homo sapiens
SLHSACCSG

SEQ ID NO: 4251 - protein, 9 aa, Homo sapiens
SYRLWGAPL

SEQ ID NO: 4252 - protein, 9 aa, Homo sapiens
RLWGAPLQP

SEQ ID NO: 4253 - protein, 9 aa, Homo sapiens
PTLGVVPQA

SEQ ID NO: 4254 - protein, 9 aa, Homo sapiens
SVPLLTHPA

SEQ ID NO: 4255 - protein, 9 aa, Homo sapiens
VLVPEAHPN

SEQ ID NO: 4256 - protein, 9 aa, Homo sapiens
PEAHPNASL

SEQ ID NO: 4257 - protein, 9 aa, Homo sapiens
AFSTLNPVL

SEQ ID NO: 4258 - protein, 9 aa, Homo sapiens
STLNPVLRH

SEQ ID NO: 4259 - protein, 9 aa, Homo sapiens
AGPMPCSRL

SEQ ID NO: 4260 - protein, 9 aa, Homo sapiens
HPAQWEPVL

SEQ ID NO: 4261 - protein, 9 aa, Homo sapiens
PAQWEPVLV

SEQ ID NO: 4262 - protein, 9 aa, Homo sapiens
LVPEAHPNA

SEQ ID NO: 4263 - protein, 9 aa, Homo sapiens
LSRTPTRQI

SEQ ID NO: 4264 - protein, 9 aa, Homo sapiens
TPTRQIGSI

SEQ ID NO: 4265 - protein, 9 aa, Homo sapiens
VLRHLFPQE

SEQ ID NO: 4266 - protein, 9 aa, Homo sapiens
QVWSVVSPA

SEQ ID NO: 4267 - protein, 9 aa, Homo sapiens
TLNPVLRHL

SEQ ID NO: 4268 - protein, 9 aa, Homo sapiens
SLRCSLHSA

SEQ ID NO: 4269 - protein, 9 aa, Homo sapiens
PLQPTLGVV

SEQ ID NO: 4270 - protein, 9 aa, Homo sapiens
YDLSQVWSV

SEQ ID NO: 4271 - protein, 9 aa, Homo sapiens
APLQPTLGV

SEQ ID NO: 4272 - protein, 9 aa, Homo sapiens
FPAHPIYDL

SEQ ID NO: 4273 - protein, 9 aa, Homo sapiens
DLSQVWSVV

SEQ ID NO: 4274 - protein, 9 aa, Homo sapiens
WGAPLQPTL

SEQ ID NO: 4275 - protein, 9 aa, Homo sapiens
LTMYVCAPV

SEQ ID NO: 4276 - protein, 9 aa, Homo sapiens
LGVVPQASV

SEQ ID NO: 4277 - protein, 9 aa, Homo sapiens
VVPQASVPL

SEQ ID NO: 4278 - protein, 9 aa, Homo sapiens
SLTMYVCAP

SEQ ID NO: 4279 - protein, 9 aa, Homo sapiens
PAFSTLNPV

SEQ ID NO: 4280 - protein, 9 aa, Homo sapiens
RLPPSLRCS

SEQ ID NO: 4281 - protein, 9 aa, Homo sapiens
VPQASVPLL

SEQ ID NO: 4282 - protein, 9 aa, Homo sapiens
WARRTSRAV

SEQ ID NO: 4283 - protein, 9 aa, Homo sapiens
LPPSLRCSL

SEQ ID NO: 4284 - protein, 9 aa, Homo sapiens
SGDPASYRL

SEQ ID NO: 4285 - protein, 9 aa, Homo sapiens
PADGPSNPL

SEQ ID NO: 4286 - protein, 9 aa, Homo sapiens
FHGPAFSTL

SEQ ID NO: 4287 - protein, 9 aa, Homo sapiens
HLFPQEAFP

SEQ ID NO: 4288 - protein, 9 aa, Homo sapiens
HPIYDLSQV

SEQ ID NO: 4289 - protein, 9 aa, Homo sapiens
SLHSACCSG

SEQ ID NO: 4290 - protein, 9 aa, Homo sapiens
SYRLWGAPL

SEQ ID NO: 4291 - protein, 9 aa, Homo sapiens
RLWGAPLQP

SEQ ID NO: 4292 - protein, 9 aa, Homo sapiens
PTLGVVPQA

SEQ ID NO: 4293 - protein, 9 aa, Homo sapiens
SVPLLTHPA

SEQ ID NO: 4294 - protein, 9 aa, Homo sapiens
VLVPEAHPN

SEQ ID NO: 4295 - protein, 9 aa, Homo sapiens
PEAHPNASL

SEQ ID NO: 4296 - protein, 9 aa, Homo sapiens
AFSTLNPVL

SEQ ID NO: 4297 - protein, 9 aa, Homo sapiens
STLNPVLRH

SEQ ID NO: 4298 - protein, 9 aa, Homo sapiens
AGPMPCSRL

SEQ ID NO: 4299 - protein, 9 aa, Homo sapiens
HPAQWEPVL

SEQ ID NO: 4300 - protein, 9 aa, Homo sapiens
PAQWEPVLV

SEQ ID NO: 4301 - protein, 9 aa, Homo sapiens
LVPEAHPNA

SEQ ID NO: 4302 - protein, 9 aa, Homo sapiens
LSRTPTRQI

SEQ ID NO: 4303 - protein, 9 aa, Homo sapiens
TPTRQIGSI

SEQ ID NO: 4304 - protein, 9 aa, Homo sapiens
VLRHLFPQE

SEQ ID NO: 4305 - protein, 9 aa, Homo sapiens
QVWSVVSPA

SEQ ID NO: 4306 - protein, 9 aa, Homo sapiens
LLPSLRCSL

SEQ ID NO: 4307 - protein, 9 aa, Homo sapiens
RLLPSLRCS

SEQ ID NO: 4308 - protein, 9 aa, Homo sapiens
PCSRLLPSL

SEQ ID NO: 4309 - protein, 9 aa, Homo sapiens
GPMPCSRLL

SEQ ID NO: 4310 - protein, 9 aa, Homo sapiens
SGDPASSRL

SEQ ID NO: 4311 - protein, 9 aa, Homo sapiens
SSRLWGAPL

SEQ ID NO: 4312 - protein, 9 aa, Homo sapiens
PASSRLWGA

SEQ ID NO: 4313 - protein, 9 aa, Homo sapiens
SRLWGAPLQ

SEQ ID NO: 4314 - protein, 9 aa, Homo sapiens
CCSGDPASS

SEQ ID NO: 4315 - protein, 9 aa, Homo sapiens
SVPLLTDPA

SEQ ID NO: 4316 - protein, 9 aa, Homo sapiens
LLTDPAQWE

SEQ ID NO: 4317 - protein, 9 aa, Homo sapiens
QASVPLLTD

SEQ ID NO: 4318 - protein, 9 aa, Homo sapiens
DPAQWEPVL

SEQ ID NO: 4319 - protein, 9 aa, Homo sapiens
PLLTDPAQW

SEQ ID NO: 4320 - protein, 9 aa, Homo sapiens
LTDPAQWEP

SEQ ID NO: 4321 - protein, 9 aa, Homo sapiens
TDPAQWEPV

SEQ ID NO: 4322 - protein, 9 aa, Homo sapiens
ASVPLLTDP

SEQ ID NO: 4323 - protein, 9 aa, Homo sapiens
DLAQWEPVL

SEQ ID NO: 4324 - protein, 9 aa, Homo sapiens
ASVPLLTDL

SEQ ID NO: 4325 - protein, 9 aa, Homo sapiens
PLLTDLAQW

SEQ ID NO: 4326 - protein, 9 aa, Homo sapiens
SVPLLTDLA

SEQ ID NO: 4327 - protein, 9 aa, Homo sapiens
LLTDLAQWE

SEQ ID NO: 4328 - protein, 9 aa, Homo sapiens
TDLAQWEPV

SEQ ID NO: 4329 - protein, 9 aa, Homo sapiens
HLAQWEPVL

SEQ ID NO: 4330 - protein, 9 aa, Homo sapiens
ASVPLLTHL

SEQ ID NO: 4331 - protein, 9 aa, Homo sapiens
LAQWEPVLV

SEQ ID NO: 4332 - protein, 9 aa, Homo sapiens
PLLTHLAQW

SEQ ID NO: 4333 - protein, 9 aa, Homo sapiens
SVPLLTHLA

SEQ ID NO: 4334 - protein, 9 aa, Homo sapiens
LLTHLAQWE

SEQ ID NO: 4335 - protein, 9 aa, Homo sapiens
THLAQWEPV

SEQ ID NO: 4336 - protein, 9 aa, Homo sapiens
SLTMYVCTP

SEQ ID NO: 4337 - protein, 9 aa, Homo sapiens
LTMYVCTPV

SEQ ID NO: 4338 - protein, 9 aa, Homo sapiens
TMYVCTPVP

SEQ ID NO: 4339 - protein, 9 aa, Homo sapiens
YVCTPVPHP

SEQ ID NO: 4340 - protein, 9 aa, Homo sapiens
ASLTMYVCT

SEQ ID NO: 4341 - protein, 9 aa, Homo sapiens
TPTRQISSI

SEQ ID NO: 4342 - protein, 9 aa, Homo sapiens
SSIDTDPPA

SEQ ID NO: 4343 - protein, 9 aa, Homo sapiens
RQISSIDTD

SEQ ID NO: 4344 - protein, 9 aa, Homo sapiens
QISSIDTDP

SEQ ID NO: 4345 - protein, 9 aa, Homo sapiens
RTPTRQISS

SEQ ID NO: 4346 - protein, 9 aa, Homo sapiens
QISSSDTDP

SEQ ID NO: 4347 - protein, 9 aa, Homo sapiens
SSSDTDPPA

SEQ ID NO: 4348 - protein, 9 aa, Homo sapiens
TPTRQISSS

SEQ ID NO: 4349 - protein, 9 aa, Homo sapiens
TRQISSSDT

SEQ ID NO: 4350 - protein, 9 aa, Homo sapiens
RQISSSDTD

SEQ ID NO: 4351 - protein, 9 aa, Homo sapiens
ISSSDTDPP

SEQ ID NO: 4352 - protein, 9 aa, Homo sapiens
PTRQISSSD

SEQ ID NO: 4353 - protein, 9 aa, Homo sapiens
QIGSSDTDP

SEQ ID NO: 4354 - protein, 9 aa, Homo sapiens
GSSDTDPPA

SEQ ID NO: 4355 - protein, 9 aa, Homo sapiens
TRQIGSSDT

SEQ ID NO: 4356 - protein, 9 aa, Homo sapiens
RQIGSSDTD

SEQ ID NO: 4357 - protein, 9 aa, Homo sapiens
TPTRQIGSS

SEQ ID NO: 4358 - protein, 9 aa, Homo sapiens
SDTDPPADG

SEQ ID NO: 4359 - protein, 9 aa, Homo sapiens
IGSSDTDPP

SEQ ID NO: 4360 - protein, 9 aa, Homo sapiens
SSDTDPPAD

SEQ ID NO: 4361 - protein, 9 aa, Homo sapiens
PTRQIGSSD

SEQ ID NO: 4362 - protein, 9 aa, Homo sapiens
SRGQALRRA

SEQ ID NO: 4363 - protein, 9 aa, Homo sapiens
RIRAVGLLT

SEQ ID NO: 4364 - protein, 9 aa, Homo sapiens
ALLMAGLAL

SEQ ID NO: 4365 - protein, 9 aa, Homo sapiens
ALQPAAAIL

SEQ ID NO: 4366 - protein, 9 aa, Homo sapiens
ALQPGTALL

SEQ ID NO: 4367 - protein, 9 aa, Homo sapiens
AVLLALLMA

SEQ ID NO: 4368 - protein, 9 aa, Homo sapiens
TVISKGCSL

SEQ ID NO: 4369 - protein, 9 aa, Homo sapiens
ALLPALGLL

SEQ ID NO: 4370 - protein, 9 aa, Homo sapiens
LLLWGPGQL

SEQ ID NO: 4371 - protein, 9 aa, Homo sapiens
GLALQPGTA

SEQ ID NO: 4372 - protein, 9 aa, Homo sapiens
AVGLLTVIS

SEQ ID NO: 4373 - protein, 9 aa, Homo sapiens
ILALLPALG

SEQ ID NO: 4374 - protein, 9 aa, Homo sapiens
LLPALGLLL

SEQ ID NO: 4375 - protein, 9 aa, Homo sapiens
LLMAGLALQ

SEQ ID NO: 4376 - protein, 9 aa, Homo sapiens
QLGEQCWTA

SEQ ID NO: 4377 - protein, 9 aa, Homo sapiens
CVDDSQDYY

SEQ ID NO: 4378 - protein, 9 aa, Homo sapiens
DLCNASGAH

SEQ ID NO: 4379 - protein, 9 aa, Homo sapiens
VLLALLMAG

SEQ ID NO: 4380 - protein, 9 aa, Homo sapiens
TALLCYSCK

SEQ ID NO: 4381 - protein, 9 aa, Homo sapiens
GLLTVISKG

SEQ ID NO: 4382 - protein, 9 aa, Homo sapiens
AILALLPAL

SEQ ID NO: 4383 - protein, 9 aa, Homo sapiens
GLLLWGPGQ

SEQ ID NO: 4384 - protein, 9 aa, Homo sapiens
LLALLMAGL

SEQ ID NO: 4385 - protein, 9 aa, Homo sapiens
ALLCYSCKA

SEQ ID NO: 4386 - protein, 9 aa, Homo sapiens
VGLLTVISK

SEQ ID NO: 4387 - protein, 9 aa, Homo sapiens
DSQDYYVGK

SEQ ID NO: 4388 - protein, 9 aa, Homo sapiens
YVGKKNITC

SEQ ID NO: 4389 - protein, 9 aa, Homo sapiens
CLQVENCTQ

SEQ ID NO: 4390 - protein, 9 aa, Homo sapiens
SLNCVDDSQ

SEQ ID NO: 4391 - protein, 9 aa, Homo sapiens
ASGAHALQP

SEQ ID NO: 4392 - protein, 9 aa, Homo sapiens
ALGLLLWGP

SEQ ID NO: 4393 - protein, 9 aa, Homo sapiens
QVSNEDCLQ

SEQ ID NO: 4394 - protein, 9 aa, Homo sapiens
QVENCTQLG

SEQ ID NO: 4395 - protein, 9 aa, Homo sapiens
TARIRAVGL

SEQ ID NO: 4396 - protein, 9 aa, Homo sapiens
VISKGCSLN

SEQ ID NO: 4397 - protein, 9 aa, Homo sapiens
LMAGLALQP

SEQ ID NO: 4398 - protein, 9 aa, Homo sapiens
WTARIRAVG

SEQ ID NO: 4399 - protein, 9 aa, Homo sapiens
IRAVGLLTV

SEQ ID NO: 4400 - protein, 9 aa, Homo sapiens
SQDYYVGKK

SEQ ID NO: 4401 - protein, 9 aa, Homo sapiens
QPGTALLCY

SEQ ID NO: 4402 - protein, 9 aa, Homo sapiens
LLCYSCKAQ

SEQ ID NO: 4403 - protein, 9 aa, Homo sapiens
RAVGLLTVI

SEQ ID NO: 4404 - protein, 9 aa, Homo sapiens
AAAILALLP

SEQ ID NO: 4405 - protein, 9 aa, Homo sapiens
AVTPTCATP

SEQ ID NO: 4406 - protein, 9 aa, Homo sapiens
RLWGAPLQP

SEQ ID NO: 4407 - protein, 9 aa, Homo sapiens
GVVPQASVP

SEQ ID NO: 4408 - protein, 9 aa, Homo sapiens
SVVSPAPSR

SEQ ID NO: 4409 - protein, 9 aa, Homo sapiens
PLLTHPAQW

SEQ ID NO: 4410 - protein, 9 aa, Homo sapiens
PLQPTLGVV

SEQ ID NO: 4411 - protein, 9 aa, Homo sapiens
ALSRTPTRQ

SEQ ID NO: 4412 - protein, 9 aa, Homo sapiens
DLSQVWSVV

SEQ ID NO: 4413 - protein, 9 aa, Homo sapiens
RRTSRAVTP

SEQ ID NO: 4414 - protein, 9 aa, Homo sapiens
RLPPSLRCS

SEQ ID NO: 4415 - protein, 9 aa, Homo sapiens
PIYDLSQVW

SEQ ID NO: 4416 - protein, 9 aa, Homo sapiens
VVSPAPSRG

SEQ ID NO: 4417 - protein, 9 aa, Homo sapiens
SLRCSLHSA

SEQ ID NO: 4418 - protein, 9 aa, Homo sapiens
VLVPEAHPN

SEQ ID NO: 4419 - protein, 9 aa, Homo sapiens
VLRHLFPQE

SEQ ID NO: 4420 - protein, 9 aa, Homo sapiens
HLFPQEAFP

SEQ ID NO: 4421 - protein, 9 aa, Homo sapiens
QVWSVVSPA

SEQ ID NO: 4422 - protein, 9 aa, Homo sapiens
PVLVPEAHP

SEQ ID NO: 4423 - protein, 9 aa, Homo sapiens
PDPPMALSR

SEQ ID NO: 4424 - protein, 9 aa, Homo sapiens
PVLRHLFPQ

SEQ ID NO: 4425 - protein, 9 aa, Homo sapiens
APSRGQALR

SEQ ID NO: 4426 - protein, 9 aa, Homo sapiens
PSRGQALRR

SEQ ID NO: 4427 - protein, 9 aa, Homo sapiens
ARRTSRAVT

SEQ ID NO: 4428 - protein, 9 aa, Homo sapiens
CCSGDPASY

SEQ ID NO: 4429 - protein, 9 aa, Homo sapiens
VVPQASVPL

SEQ ID NO: 4430 - protein, 9 aa, Homo sapiens
LLTHPAQWE

SEQ ID NO: 4431 - protein, 9 aa, Homo sapiens
TLNPVLRHL

SEQ ID NO: 4432 - protein, 9 aa, Homo sapiens
SLHSACCSG

SEQ ID NO: 4433 - protein, 9 aa, Homo sapiens
TLGVVPQAS

SEQ ID NO: 4434 - protein, 9 aa, Homo sapiens
QASVPLLTH

SEQ ID NO: 4435 - protein, 9 aa, Homo sapiens
RQIGSIDTD

SEQ ID NO: 4436 - protein, 9 aa, Homo sapiens
TTWARRTSR

SEQ ID NO: 4437 - protein, 9 aa, Homo sapiens
CSRLPPSLR

SEQ ID NO: 4438 - protein, 9 aa, Homo sapiens
ASYRLWGAP

SEQ ID NO: 4439 - protein, 9 aa, Homo sapiens
SVPLLTHPA

SEQ ID NO: 4440 - protein, 9 aa, Homo sapiens
SLTMYVCAP

SEQ ID NO: 4441 - protein, 9 aa, Homo sapiens
YVCAPVPHP

SEQ ID NO: 4442 - protein, 9 aa, Homo sapiens
MALSRTPTR

SEQ ID NO: 4443 - protein, 9 aa, Homo sapiens
RGQALRRAR

SEQ ID NO: 4444 - protein, 9 aa, Homo sapiens
CSGDPASYR

SEQ ID NO: 4445 - protein, 9 aa, Homo sapiens
SYRLWGAPL

SEQ ID NO: 4446 - protein, 9 aa, Homo sapiens
LQPTLGVVP

SEQ ID NO: 4447 - protein, 9 aa, Homo sapiens
AQWEPVLVP

SEQ ID NO: 4448 - protein, 9 aa, Homo sapiens
LVPEAHPNA

SEQ ID NO: 4449 - protein, 9 aa, Homo sapiens
AHPNASLTM

SEQ ID NO: 4450 - protein, 9 aa, Homo sapiens
TMYVCAPVP

SEQ ID NO: 4451 - protein, 9 aa, Homo sapiens
QIGSIDTDP

SEQ ID NO: 4452 - protein, 9 aa, Homo sapiens
SIDTDPPAD

SEQ ID NO: 4453 - protein, 9 aa, Homo sapiens
STLNPVLRH

SEQ ID NO: 4454 - protein, 9 aa, Homo sapiens
RHLFPQEAF

SEQ ID NO: 4455 - protein, 9 aa, Homo sapiens
RLLPSLRCS

SEQ ID NO: 4456 - protein, 9 aa, Homo sapiens
LLPSLRCSL

SEQ ID NO: 4457 - protein, 9 aa, Homo sapiens
CSRLLPSLR

SEQ ID NO: 4458 - protein, 9 aa, Homo sapiens
LPSLRCSLH

SEQ ID NO: 4459 - protein, 9 aa, Homo sapiens
CSGDPASSR

SEQ ID NO: 4460 - protein, 9 aa, Homo sapiens
SSRLWGAPL

SEQ ID NO: 4461 - protein, 9 aa, Homo sapiens
CCSGDPASS

SEQ ID NO: 4462 - protein, 9 aa, Homo sapiens
ASSRLWGAP

SEQ ID NO: 4463 - protein, 9 aa, Homo sapiens
SRLWGAPLQ

SEQ ID NO: 4464 - protein, 9 aa, Homo sapiens
SGDPASSRL

SEQ ID NO: 4465 - protein, 9 aa, Homo sapiens
DPASSRLWG

SEQ ID NO: 4466 - protein, 9 aa, Homo sapiens
PLLTDPAQW

SEQ ID NO: 4467 - protein, 9 aa, Homo sapiens
LLTDPAQWE

SEQ ID NO: 4468 - protein, 9 aa, Homo sapiens
SVPLLTDPA

SEQ ID NO: 4469 - protein, 9 aa, Homo sapiens
QASVPLLTD

SEQ ID NO: 4470 - protein, 9 aa, Homo sapiens
PLLTDLAQW

SEQ ID NO: 4471 - protein, 9 aa, Homo sapiens
LLTDLAQWE

SEQ ID NO: 4472 - protein, 9 aa, Homo sapiens
DLAQWEPVL

SEQ ID NO: 4473 - protein, 9 aa, Homo sapiens
SVPLLTDLA

SEQ ID NO: 4474 - protein, 9 aa, Homo sapiens
PLLTHLAQW

SEQ ID NO: 4475 - protein, 9 aa, Homo sapiens
HLAQWEPVL

SEQ ID NO: 4476 - protein, 9 aa, Homo sapiens
LLTHLAQWE

SEQ ID NO: 4477 - protein, 9 aa, Homo sapiens
SVPLLTHLA

SEQ ID NO: 4478 - protein, 9 aa, Homo sapiens
SLTMYVCTP

SEQ ID NO: 4479 - protein, 9 aa, Homo sapiens
YVCTPVPHP

SEQ ID NO: 4480 - protein, 9 aa, Homo sapiens
ASLTMYVCT

SEQ ID NO: 4481 - protein, 9 aa, Homo sapiens
MYVCTPVPH

SEQ ID NO: 4482 - protein, 9 aa, Homo sapiens
TMYVCTPVP

SEQ ID NO: 4483 - protein, 9 aa, Homo sapiens
RQISSIDTD

SEQ ID NO: 4484 - protein, 9 aa, Homo sapiens
QISSIDTDP

SEQ ID NO: 4485 - protein, 9 aa, Homo sapiens
RTPTRQISS

SEQ ID NO: 4486 - protein, 9 aa, Homo sapiens
TPTRQISSI

SEQ ID NO: 4487 - protein, 9 aa, Homo sapiens
PTRQISSID

SEQ ID NO: 4488 - protein, 9 aa, Homo sapiens
SRTPTRQIS

SEQ ID NO: 4489 - protein, 9 aa, Homo sapiens
SSIDTDPPA

SEQ ID NO: 4490 - protein, 9 aa, Homo sapiens
RQISSSDTD

SEQ ID NO: 4491 - protein, 9 aa, Homo sapiens
QISSSDTDP

SEQ ID NO: 4492 - protein, 9 aa, Homo sapiens
TPTRQISSS

SEQ ID NO: 4493 - protein, 9 aa, Homo sapiens
PTRQISSSD

SEQ ID NO: 4494 - protein, 9 aa, Homo sapiens
RQIGSSDTD

SEQ ID NO: 4495 - protein, 9 aa, Homo sapiens
PTRQIGSSD

SEQ ID NO: 4496 - protein, 9 aa, Homo sapiens
QIGSSDTDP

SEQ ID NO: 4497 - protein, 9 aa, Homo sapiens
TPTRQIGSS

SEQ ID NO: 4498 - protein, 9 aa, Homo sapiens
TRQIGSSDT

SEQ ID NO: 4499 - protein, 9 aa, Homo sapiens
SDTDPPADG

SEQ ID NO: 4500 - protein, 9 aa, Homo sapiens
RGQALRRAQ

SEQ ID NO: 4501 - protein, 9 aa, Homo sapiens
TVISKGCSL

SEQ ID NO: 4502 - protein, 9 aa, Homo sapiens
CVDDSQDYY

SEQ ID NO: 4503 - protein, 9 aa, Homo sapiens
AILALLPAL

SEQ ID NO: 4504 - protein, 9 aa, Homo sapiens
ARIRAVGLL

SEQ ID NO: 4505 - protein, 9 aa, Homo sapiens
DTDLCNASG

SEQ ID NO: 4506 - protein, 9 aa, Homo sapiens
AVLLALLMA

SEQ ID NO: 4507 - protein, 9 aa, Homo sapiens
LQVENCTQL

SEQ ID NO: 4508 - protein, 9 aa, Homo sapiens
QPGTALLCY

SEQ ID NO: 4509 - protein, 9 aa, Homo sapiens
ENCTQLGEQ

SEQ ID NO: 4510 - protein, 9 aa, Homo sapiens
NCVDDSQDY

SEQ ID NO: 4511 - protein, 9 aa, Homo sapiens
AQVSNEDCL

SEQ ID NO: 4512 - protein, 9 aa, Homo sapiens
EDCLQVENC

SEQ ID NO: 4513 - protein, 9 aa, Homo sapiens
QPAAAILAL

SEQ ID NO: 4514 - protein, 9 aa, Homo sapiens
PAAAILALL

SEQ ID NO: 4515 - protein, 9 aa, Homo sapiens
ALLPALGLL

SEQ ID NO: 4516 - protein, 9 aa, Homo sapiens
MKAVLLALL

SEQ ID NO: 4517 - protein, 9 aa, Homo sapiens
LTVISKGCS

SEQ ID NO: 4518 - protein, 9 aa, Homo sapiens
YVGKKNITC

SEQ ID NO: 4519 - protein, 9 aa, Homo sapiens
NITCCDTDL

SEQ ID NO: 4520 - protein, 9 aa, Homo sapiens
EAFPAHPIY

SEQ ID NO: 4521 - protein, 9 aa, Homo sapiens
VVPQASVPL

SEQ ID NO: 4522 - protein, 9 aa, Homo sapiens
DTDPPADGP

SEQ ID NO: 4523 - protein, 9 aa, Homo sapiens
SVVSPAPSR

SEQ ID NO: 4524 - protein, 9 aa, Homo sapiens
GVVPQASVP

SEQ ID NO: 4525 - protein, 9 aa, Homo sapiens
QVWSVVSPA

SEQ ID NO: 4526 - protein, 9 aa, Homo sapiens
EPVLVPEAH

SEQ ID NO: 4527 - protein, 9 aa, Homo sapiens
HPNASLTMY

SEQ ID NO: 4528 - protein, 9 aa, Homo sapiens
YVCAPVPHP

SEQ ID NO: 4529 - protein, 9 aa, Homo sapiens
STLNPVLRH

SEQ ID NO: 4530 - protein, 9 aa, Homo sapiens
TLNPVLRHL

SEQ ID NO: 4531 - protein, 9 aa, Homo sapiens
PVLRHLFPQ

SEQ ID NO: 4532 - protein, 9 aa, Homo sapiens
AVTPTCATP

SEQ ID NO: 4533 - protein, 9 aa, Homo sapiens
PTLGVVPQA

SEQ ID NO: 4534 - protein, 9 aa, Homo sapiens
EAHPNASLT

SEQ ID NO: 4535 - protein, 9 aa, Homo sapiens
DPPMALSRT

SEQ ID NO: 4536 - protein, 9 aa, Homo sapiens
RTSRAVTPT

SEQ ID NO: 4537 - protein, 9 aa, Homo sapiens
VPQASVPLL

SEQ ID NO: 4538 - protein, 9 aa, Homo sapiens
SVPLLTHPA

SEQ ID NO: 4539 - protein, 9 aa, Homo sapiens
LVPEAHPNA

SEQ ID NO: 4540 - protein, 9 aa, Homo sapiens
PTRQIGSID

SEQ ID NO: 4541 - protein, 9 aa, Homo sapiens
FPAHPIYDL

SEQ ID NO: 4542 - protein, 9 aa, Homo sapiens
VVSPAPSRG

SEQ ID NO: 4543 - protein, 9 aa, Homo sapiens
PCSRLLPSL

SEQ ID NO: 4544 - protein, 9 aa, Homo sapiens
LLPSLRCSL

SEQ ID NO: 4545 - protein, 9 aa, Homo sapiens
GPMPCSRLL

SEQ ID NO: 4546 - protein, 9 aa, Homo sapiens
MPCSRLLPS

SEQ ID NO: 4547 - protein, 9 aa, Homo sapiens
SGDPASSRL

SEQ ID NO: 4548 - protein, 9 aa, Homo sapiens
DPASSRLWG

SEQ ID NO: 4549 - protein, 9 aa, Homo sapiens
SSRLWGAPL

SEQ ID NO: 4550 - protein, 9 aa, Homo sapiens
PASSRLWGA

SEQ ID NO: 4551 - protein, 9 aa, Homo sapiens
DPAQWEPVL

SEQ ID NO: 4552 - protein, 9 aa, Homo sapiens
SVPLLTDPA

SEQ ID NO: 4553 - protein, 9 aa, Homo sapiens
ASVPLLTDP

SEQ ID NO: 4554 - protein, 9 aa, Homo sapiens
LTDPAQWEP

SEQ ID NO: 4555 - protein, 9 aa, Homo sapiens
ASVPLLTDL

SEQ ID NO: 4556 - protein, 9 aa, Homo sapiens
DLAQWEPVL

SEQ ID NO: 4557 - protein, 9 aa, Homo sapiens
SVPLLTDLA

SEQ ID NO: 4558 - protein, 9 aa, Homo sapiens
LTDLAQWEP

SEQ ID NO: 4559 - protein, 9 aa, Homo sapiens
ASVPLLTHL

SEQ ID NO: 4560 - protein, 9 aa, Homo sapiens
SVPLLTHLA

SEQ ID NO: 4561 - protein, 9 aa, Homo sapiens
LTHLAQWEP

SEQ ID NO: 4562 - protein, 9 aa, Homo sapiens
HLAQWEPVL

SEQ ID NO: 4563 - protein, 9 aa, Homo sapiens
YVCTPVPHP

SEQ ID NO: 4564 - protein, 9 aa, Homo sapiens
LTMYVCTPV

SEQ ID NO: 4565 - protein, 9 aa, Homo sapiens
CTPVPHPDP

SEQ ID NO: 4566 - protein, 9 aa, Homo sapiens
SLTMYVCTP

SEQ ID NO: 4567 - protein, 9 aa, Homo sapiens
PTRQISSID

SEQ ID NO: 4568 - protein, 9 aa, Homo sapiens
RTPTRQISS

SEQ ID NO: 4569 - protein, 9 aa, Homo sapiens
RQISSIDTD

SEQ ID NO: 4570 - protein, 9 aa, Homo sapiens
TPTRQISSI

SEQ ID NO: 4571 - protein, 9 aa, Homo sapiens
QISSIDTDP

SEQ ID NO: 4572 - protein, 9 aa, Homo sapiens
SSIDTDPPA

SEQ ID NO: 4573 - protein, 9 aa, Homo sapiens
PTRQISSSD

SEQ ID NO: 4574 - protein, 9 aa, Homo sapiens
TPTRQISSS

SEQ ID NO: 4575 - protein, 9 aa, Homo sapiens
RQISSSDTD

SEQ ID NO: 4576 - protein, 9 aa, Homo sapiens
QISSSDTDP

SEQ ID NO: 4577 - protein, 9 aa, Homo sapiens
PTRQIGSSD

SEQ ID NO: 4578 - protein, 9 aa, Homo sapiens
TPTRQIGSS

SEQ ID NO: 4579 - protein, 9 aa, Homo sapiens
SRGQALRRA

SEQ ID NO: 4580 - protein, 9 aa, Homo sapiens
QPAAAILAL

SEQ ID NO: 4581 - protein, 9 aa, Homo sapiens
ALLMAGLAL

SEQ ID NO: 4582 - protein, 9 aa, Homo sapiens
LALQPGTAL

SEQ ID NO: 4583 - protein, 9 aa, Homo sapiens
ALQPGTALL

SEQ ID NO: 4584 - protein, 9 aa, Homo sapiens
AILALLPAL

SEQ ID NO: 4585 - protein, 9 aa, Homo sapiens
LALLPALGL

SEQ ID NO: 4586 - protein, 9 aa, Homo sapiens
TARIRAVGL

SEQ ID NO: 4587 - protein, 9 aa, Homo sapiens
ALQPAAAIL

SEQ ID NO: 4588 - protein, 9 aa, Homo sapiens
LLPALGLLL

SEQ ID NO: 4589 - protein, 9 aa, Homo sapiens
QPGTALLCY

SEQ ID NO: 4590 - protein, 9 aa, Homo sapiens
ARIRAVGLL

SEQ ID NO: 4591 - protein, 9 aa, Homo sapiens
RIRAVGLLT

SEQ ID NO: 4592 - protein, 9 aa, Homo sapiens
PAAAILALL

SEQ ID NO: 4593 - protein, 9 aa, Homo sapiens
ALLPALGLL

SEQ ID NO: 4594 - protein, 9 aa, Homo sapiens
LPALGLLLW

SEQ ID NO: 4595 - protein, 9 aa, Homo sapiens
MKAVLLALL

SEQ ID NO: 4596 - protein, 9 aa, Homo sapiens
LLALLMAGL

SEQ ID NO: 4597 - protein, 9 aa, Homo sapiens
AQVSNEDCL

SEQ ID NO: 4598 - protein, 9 aa, Homo sapiens
CNASGAHAL

SEQ ID NO: 4599 - protein, 9 aa, Homo sapiens
APLQPTLGV

SEQ ID NO: 4600 - protein, 9 aa, Homo sapiens
FPAHPIYDL

SEQ ID NO: 4601 - protein, 9 aa, Homo sapiens
VPQASVPLL

SEQ ID NO: 4602 - protein, 9 aa, Homo sapiens
HPAQWEPVL

SEQ ID NO: 4603 - protein, 9 aa, Homo sapiens
LPPSLRCSL

SEQ ID NO: 4604 - protein, 9 aa, Homo sapiens
SPAPSRGQA

SEQ ID NO: 4605 - protein, 9 aa, Homo sapiens
VPHPDPPMA

SEQ ID NO: 4606 - protein, 9 aa, Homo sapiens
TPAGPMPCS

SEQ ID NO: 4607 - protein, 9 aa, Homo sapiens
PADGPSNPL

SEQ ID NO: 4608 - protein, 9 aa, Homo sapiens
HPDPPMALS

SEQ ID NO: 4609 - protein, 9 aa, Homo sapiens
DPPMALSRT

SEQ ID NO: 4610 - protein, 9 aa, Homo sapiens
TPTRQIGSI

SEQ ID NO: 4611 - protein, 9 aa, Homo sapiens
AFSTLNPVL

SEQ ID NO: 4612 - protein, 9 aa, Homo sapiens
HPIYDLSQV

SEQ ID NO: 4613 - protein, 9 aa, Homo sapiens
AGPMPCSRL

SEQ ID NO: 4614 - protein, 9 aa, Homo sapiens
SYRLWGAPL

SEQ ID NO: 4615 - protein, 9 aa, Homo sapiens
PEAHPNASL

SEQ ID NO: 4616 - protein, 9 aa, Homo sapiens
GPSNPLCCC

SEQ ID NO: 4617 - protein, 9 aa, Homo sapiens
APSRGQALR

SEQ ID NO: 4618 - protein, 9 aa, Homo sapiens
DPASYRLWG

SEQ ID NO: 4619 - protein, 9 aa, Homo sapiens
QPTLGVVPQ

SEQ ID NO: 4620 - protein, 9 aa, Homo sapiens
APVPHPDPP

SEQ ID NO: 4621 - protein, 9 aa, Homo sapiens
PHPDPPMAL

SEQ ID NO: 4622 - protein, 9 aa, Homo sapiens
GPAFSTLNP

SEQ ID NO: 4623 - protein, 9 aa, Homo sapiens
ARRTSRAVT

SEQ ID NO: 4624 - protein, 9 aa, Homo sapiens
TPTCATPAG

SEQ ID NO: 4625 - protein, 9 aa, Homo sapiens
PCSRLPPSL

SEQ ID NO: 4626 - protein, 9 aa, Homo sapiens
WGAPLQPTL

SEQ ID NO: 4627 - protein, 9 aa, Homo sapiens
VVPQASVPL

SEQ ID NO: 4628 - protein, 9 aa, Homo sapiens
DPPADGPSN

SEQ ID NO: 4629 - protein, 9 aa, Homo sapiens
FHGPAFSTL

SEQ ID NO: 4630 - protein, 9 aa, Homo sapiens
NPVLRHLFP

SEQ ID NO: 4631 - protein, 9 aa, Homo sapiens
FPQEAFPAH

SEQ ID NO: 4632 - protein, 9 aa, Homo sapiens
RTSRAVTPT

SEQ ID NO: 4633 - protein, 9 aa, Homo sapiens
RAVTPTCAT

SEQ ID NO: 4634 - protein, 9 aa, Homo sapiens
GPMPCSRLP

SEQ ID NO: 4635 - protein, 9 aa, Homo sapiens
MPCSRLPPS

SEQ ID NO: 4636 - protein, 9 aa, Homo sapiens
PPSLRCSLH

SEQ ID NO: 4637 - protein, 9 aa, Homo sapiens
SGDPASYRL

SEQ ID NO: 4638 - protein, 9 aa, Homo sapiens
LWGAPLQPT

SEQ ID NO: 4639 - protein, 9 aa, Homo sapiens
VPLLTHPAQ

SEQ ID NO: 4640 - protein, 9 aa, Homo sapiens
EPVLVPEAH

SEQ ID NO: 4641 - protein, 9 aa, Homo sapiens
VPEAHPNAS

SEQ ID NO: 4642 - protein, 9 aa, Homo sapiens
HPNASLTMY

SEQ ID NO: 4643 - protein, 9 aa, Homo sapiens
PPMALSRTP

SEQ ID NO: 4644 - protein, 9 aa, Homo sapiens
LSRTPTRQI

SEQ ID NO: 4645 - protein, 9 aa, Homo sapiens
PAPSRGQAL

SEQ ID NO: 4646 - protein, 9 aa, Homo sapiens
TCATPAGPM

SEQ ID NO: 4647 - protein, 9 aa, Homo sapiens
PVPHPDPPM

SEQ ID NO: 4648 - protein, 9 aa, Homo sapiens
PPADGPSNP

SEQ ID NO: 4649 - protein, 9 aa, Homo sapiens
CFHGPAFST

SEQ ID NO: 4650 - protein, 9 aa, Homo sapiens
TLNPVLRHL

SEQ ID NO: 4651 - protein, 9 aa, Homo sapiens
RHLFPQEAF

SEQ ID NO: 4652 - protein, 9 aa, Homo sapiens
QEAFPAHPI

SEQ ID NO: 4653 - protein, 9 aa, Homo sapiens
GPMPCSRLL

SEQ ID NO: 4654 - protein, 9 aa, Homo sapiens
MPCSRLLPS

SEQ ID NO: 4655 - protein, 9 aa, Homo sapiens
PCSRLLPSL

SEQ ID NO: 4656 - protein, 9 aa, Homo sapiens
LPSLRCSLH

SEQ ID NO: 4657 - protein, 9 aa, Homo sapiens
LLPSLRCSL

SEQ ID NO: 4658 - protein, 9 aa, Homo sapiens
SSRLWGAPL

SEQ ID NO: 4659 - protein, 9 aa, Homo sapiens
DPASSRLWG

SEQ ID NO: 4660 - protein, 9 aa, Homo sapiens
SGDPASSRL

SEQ ID NO: 4661 - protein, 9 aa, Homo sapiens
PASSRLWGA

SEQ ID NO: 4662 - protein, 9 aa, Homo sapiens
DPAQWEPVL

SEQ ID NO: 4663 - protein, 9 aa, Homo sapiens
VPLLTDPAQ

SEQ ID NO: 4664 - protein, 9 aa, Homo sapiens
ASVPLLTDL

SEQ ID NO: 4665 - protein, 9 aa, Homo sapiens
VPLLTDLAQ

SEQ ID NO: 4666 - protein, 9 aa, Homo sapiens
DLAQWEPVL

SEQ ID NO: 4667 - protein, 9 aa, Homo sapiens
TDLAQWEPV

SEQ ID NO: 4668 - protein, 9 aa, Homo sapiens
SVPLLTDLA

SEQ ID NO: 4669 - protein, 9 aa, Homo sapiens
ASVPLLTHL

SEQ ID NO: 4670 - protein, 9 aa, Homo sapiens
VPLLTHLAQ

SEQ ID NO: 4671 - protein, 9 aa, Homo sapiens
HLAQWEPVL

SEQ ID NO: 4672 - protein, 9 aa, Homo sapiens
THLAQWEPV

SEQ ID NO: 4673 - protein, 9 aa, Homo sapiens
LAQWEPVLV

SEQ ID NO: 4674 - protein, 9 aa, Homo sapiens
SVPLLTHLA

SEQ ID NO: 4675 - protein, 9 aa, Homo sapiens
ASLTMYVCT

SEQ ID NO: 4676 - protein, 9 aa, Homo sapiens
LTMYVCTPV

SEQ ID NO: 4677 - protein, 9 aa, Homo sapiens
YVCTPVPHP

SEQ ID NO: 4678 - protein, 9 aa, Homo sapiens
CTPVPHPDP

SEQ ID NO: 4679 - protein, 9 aa, Homo sapiens
TPTRQISSI

SEQ ID NO: 4680 - protein, 9 aa, Homo sapiens
SSIDTDPPA

SEQ ID NO: 4681 - protein, 9 aa, Homo sapiens
TPTRQISSS

SEQ ID NO: 4682 - protein, 9 aa, Homo sapiens
SSSDTDPPA

SEQ ID NO: 4683 - protein, 9 aa, Homo sapiens
TRQISSSDT

SEQ ID NO: 4684 - protein, 9 aa, Homo sapiens
ISSSDTDPP

SEQ ID NO: 4685 - protein, 9 aa, Homo sapiens
TPTRQIGSS

SEQ ID NO: 4686 - protein, 9 aa, Homo sapiens
GSSDTDPPA

SEQ ID NO: 4687 - protein, 9 aa, Homo sapiens
TRQIGSSDT

SEQ ID NO: 4688 - protein, 9 aa, Homo sapiens
IGSSDTDPP

SEQ ID NO: 4689 - protein, 9 aa, Homo sapiens
SDTDPPADG

SEQ ID NO: 4690 - protein, 9 aa, Homo sapiens
SRGQALRRA

SEQ ID NO: 4691 - protein, 9 aa, Homo sapiens
TARIRAVGL

SEQ ID NO: 4692 - protein, 9 aa, Homo sapiens
TVISKGCSL

SEQ ID NO: 4693 - protein, 9 aa, Homo sapiens
QPAAAILAL

SEQ ID NO: 4694 - protein, 9 aa, Homo sapiens
LLALLMAGL

SEQ ID NO: 4695 - protein, 9 aa, Homo sapiens
ALLMAGLAL

SEQ ID NO: 4696 - protein, 9 aa, Homo sapiens
ALQPGTALL

SEQ ID NO: 4697 - protein, 9 aa, Homo sapiens
ALQPAAAIL

SEQ ID NO: 4698 - protein, 9 aa, Homo sapiens
ALLPALGLL

SEQ ID NO: 4699 - protein, 9 aa, Homo sapiens
LLPALGLLL

SEQ ID NO: 4700 - protein, 9 aa, Homo sapiens
LLLWGPGQL

SEQ ID NO: 4701 - protein, 9 aa, Homo sapiens
LALQPGTAL

SEQ ID NO: 4702 - protein, 9 aa, Homo sapiens
AILALLPAL

SEQ ID NO: 4703 - protein, 9 aa, Homo sapiens
LALLPALGL

SEQ ID NO: 4704 - protein, 9 aa, Homo sapiens
NITCCDTDL

SEQ ID NO: 4705 - protein, 9 aa, Homo sapiens
PAAAILALL

SEQ ID NO: 4706 - protein, 9 aa, Homo sapiens
PAPSRGQAL

SEQ ID NO: 4707 - protein, 9 aa, Homo sapiens
SYRLWGAPL

SEQ ID NO: 4708 - protein, 9 aa, Homo sapiens
VPQASVPLL

SEQ ID NO: 4709 - protein, 9 aa, Homo sapiens
FPAHPIYDL

SEQ ID NO: 4710 - protein, 9 aa, Homo sapiens
HPAQWEPVL

SEQ ID NO: 4711 - protein, 9 aa, Homo sapiens
LPPSLRCSL

SEQ ID NO: 4712 - protein, 9 aa, Homo sapiens
TLNPVLRHL

SEQ ID NO: 4713 - protein, 9 aa, Homo sapiens
PPSLRCSLH

SEQ ID NO: 4714 - protein, 9 aa, Homo sapiens
NPVLRHLFP

SEQ ID NO: 4715 - protein, 9 aa, Homo sapiens
MPCSRLPPS

SEQ ID NO: 4716 - protein, 9 aa, Homo sapiens
SLRCSLHSA

SEQ ID NO: 4717 - protein, 9 aa, Homo sapiens
PADGPSNPL

SEQ ID NO: 4718 - protein, 9 aa, Homo sapiens
PASYRLWGA

SEQ ID NO: 4719 - protein, 9 aa, Homo sapiens
TPTRQIGSI

SEQ ID NO: 4720 - protein, 9 aa, Homo sapiens
VLRHLFPQE

SEQ ID NO: 4721 - protein, 9 aa, Homo sapiens
SGDPASYRL

SEQ ID NO: 4722 - protein, 9 aa, Homo sapiens
VVPQASVPL

SEQ ID NO: 4723 - protein, 9 aa, Homo sapiens
MALSRTPTR

SEQ ID NO: 4724 - protein, 9 aa, Homo sapiens
LSRTPTRQI

SEQ ID NO: 4725 - protein, 9 aa, Homo sapiens
WARRTSRAV

SEQ ID NO: 4726 - protein, 9 aa, Homo sapiens
PEAHPNASL

SEQ ID NO: 4727 - protein, 9 aa, Homo sapiens
PHPDPPMAL

SEQ ID NO: 4728 - protein, 9 aa, Homo sapiens
FHGPAFSTL

SEQ ID NO: 4729 - protein, 9 aa, Homo sapiens
AFSTLNPVL

SEQ ID NO: 4730 - protein, 9 aa, Homo sapiens
GPMPCSRLL

SEQ ID NO: 4731 - protein, 9 aa, Homo sapiens
LLPSLRCSL

SEQ ID NO: 4732 - protein, 9 aa, Homo sapiens
LPSLRCSLH

SEQ ID NO: 4733 - protein, 9 aa, Homo sapiens
MPCSRLLPS

SEQ ID NO: 4734 - protein, 9 aa, Homo sapiens
PCSRLLPSL

SEQ ID NO: 4735 - protein, 9 aa, Homo sapiens
SSRLWGAPL

SEQ ID NO: 4736 - protein, 9 aa, Homo sapiens
SGDPASSRL

SEQ ID NO: 4737 - protein, 9 aa, Homo sapiens
PASSRLWGA

SEQ ID NO: 4738 - protein, 9 aa, Homo sapiens
DPAQWEPVL

SEQ ID NO: 4739 - protein, 9 aa, Homo sapiens
VPLLTDPAQ

SEQ ID NO: 4740 - protein, 9 aa, Homo sapiens
DLAQWEPVL

SEQ ID NO: 4741 - protein, 9 aa, Homo sapiens
ASVPLLTDL

SEQ ID NO: 4742 - protein, 9 aa, Homo sapiens
VPLLTDLAQ

SEQ ID NO: 4743 - protein, 9 aa, Homo sapiens
HLAQWEPVL

SEQ ID NO: 4744 - protein, 9 aa, Homo sapiens
ASVPLLTHL

SEQ ID NO: 4745 - protein, 9 aa, Homo sapiens
VPLLTHLAQ

SEQ ID NO: 4746 - protein, 9 aa, Homo sapiens
SLTMYVCTP

SEQ ID NO: 4747 - protein, 9 aa, Homo sapiens
TPTRQISSI

SEQ ID NO: 4748 - protein, 9 aa, Homo sapiens
RTPTRQISS

SEQ ID NO: 4749 - protein, 9 aa, Homo sapiens
PTRQISSID

SEQ ID NO: 4750 - protein, 9 aa, Homo sapiens
TPTRQISSS

SEQ ID NO: 4751 - protein, 9 aa, Homo sapiens
PTRQISSSD

SEQ ID NO: 4752 - protein, 9 aa, Homo sapiens
QISSSDTDP

SEQ ID NO: 4753 - protein, 9 aa, Homo sapiens
TPTRQIGSS

SEQ ID NO: 4754 - protein, 9 aa, Homo sapiens
PTRQIGSSD

SEQ ID NO: 4755 - protein, 9 aa, Homo sapiens
QIGSSDTDP

SEQ ID NO: 4756 - protein, 9 aa, Homo sapiens
SSDTDPPAD

SEQ ID NO: 4757 - protein, 9 aa, Homo sapiens
SRGQALRRA

SEQ ID NO: 4758 - protein, 9 aa, Homo sapiens
RGQALRRAQ

SEQ ID NO: 4759 - protein, 9 aa, Homo sapiens
LALQPGTAL

SEQ ID NO: 4760 - protein, 9 aa, Homo sapiens
ALQPGTALL

SEQ ID NO: 4761 - protein, 9 aa, Homo sapiens
TARIRAVGL

SEQ ID NO: 4762 - protein, 9 aa, Homo sapiens
CNASGAHAL

SEQ ID NO: 4763 - protein, 9 aa, Homo sapiens
AHALQPAAA

SEQ ID NO: 4764 - protein, 9 aa, Homo sapiens
QPAAAILAL

SEQ ID NO: 4765 - protein, 9 aa, Homo sapiens
MKAVLLALL

SEQ ID NO: 4766 - protein, 9 aa, Homo sapiens
LLALLMAGL

SEQ ID NO: 4767 - protein, 9 aa, Homo sapiens
LQVENCTQL

SEQ ID NO: 4768 - protein, 9 aa, Homo sapiens
ALQPAAAIL

SEQ ID NO: 4769 - protein, 9 aa, Homo sapiens
AILALLPAL

SEQ ID NO: 4770 - protein, 9 aa, Homo sapiens
ALLPALGLL

SEQ ID NO: 4771 - protein, 9 aa, Homo sapiens
LLLWGPGQL

SEQ ID NO: 4772 - protein, 9 aa, Homo sapiens
ALLMAGLAL

SEQ ID NO: 4773 - protein, 9 aa, Homo sapiens
AQVSNEDCL

SEQ ID NO: 4774 - protein, 9 aa, Homo sapiens
ARIRAVGLL

SEQ ID NO: 4775 - protein, 9 aa, Homo sapiens
TVISKGCSL

SEQ ID NO: 4776 - protein, 9 aa, Homo sapiens
PAAAILALL

SEQ ID NO: 4777 - protein, 9 aa, Homo sapiens
LALLPALGL

SEQ ID NO: 4778 - protein, 9 aa, Homo sapiens
NITCCDTDL

SEQ ID NO: 4779 - protein, 9 aa, Homo sapiens
LLPALGLLL

SEQ ID NO: 4780 - protein, 9 aa, Homo sapiens
KAVLLALLM

SEQ ID NO: 4781 - protein, 9 aa, Homo sapiens
IRAVGLLTV

SEQ ID NO: 4782 - protein, 9 aa, Homo sapiens
PHPDPPMAL

SEQ ID NO: 4783 - protein, 9 aa, Homo sapiens
FHGPAFSTL

SEQ ID NO: 4784 - protein, 9 aa, Homo sapiens
RHLFPQEAF

SEQ ID NO: 4785 - protein, 9 aa, Homo sapiens
AHPNASLTM

SEQ ID NO: 4786 - protein, 9 aa, Homo sapiens
WGAPLQPTL

SEQ ID NO: 4787 - protein, 9 aa, Homo sapiens
HPAQWEPVL

SEQ ID NO: 4788 - protein, 9 aa, Homo sapiens
TLNPVLRHL

SEQ ID NO: 4789 - protein, 9 aa, Homo sapiens
SGDPASYRL

SEQ ID NO: 4790 - protein, 9 aa, Homo sapiens
AFSTLNPVL

SEQ ID NO: 4791 - protein, 9 aa, Homo sapiens
AGPMPCSRL

SEQ ID NO: 4792 - protein, 9 aa, Homo sapiens
PCSRLPPSL

SEQ ID NO: 4793 - protein, 9 aa, Homo sapiens
VVPQASVPL

SEQ ID NO: 4794 - protein, 9 aa, Homo sapiens
FPAHPIYDL

SEQ ID NO: 4795 - protein, 9 aa, Homo sapiens
THRTTTWAR

SEQ ID NO: 4796 - protein, 9 aa, Homo sapiens
VPQASVPLL

SEQ ID NO: 4797 - protein, 9 aa, Homo sapiens
PEAHPNASL

SEQ ID NO: 4798 - protein, 9 aa, Homo sapiens
PADGPSNPL

SEQ ID NO: 4799 - protein, 9 aa, Homo sapiens
LPPSLRCSL

SEQ ID NO: 4800 - protein, 9 aa, Homo sapiens
LHSACCSGD

SEQ ID NO: 4801 - protein, 9 aa, Homo sapiens
THPAQWEPV

SEQ ID NO: 4802 - protein, 9 aa, Homo sapiens
PAPSRGQAL

SEQ ID NO: 4803 - protein, 9 aa, Homo sapiens
GPMPCSRLL

SEQ ID NO: 4804 - protein, 9 aa, Homo sapiens
PCSRLLPSL

SEQ ID NO: 4805 - protein, 9 aa, Homo sapiens
LLPSLRCSL

SEQ ID NO: 4806 - protein, 9 aa, Homo sapiens
SGDPASSRL

SEQ ID NO: 4807 - protein, 9 aa, Homo sapiens
SSRLWGAPL

SEQ ID NO: 4808 - protein, 9 aa, Homo sapiens
DPAQWEPVL

SEQ ID NO: 4809 - protein, 9 aa, Homo sapiens
DLAQWEPVL

SEQ ID NO: 4810 - protein, 9 aa, Homo sapiens
ASVPLLTDL

SEQ ID NO: 4811 - protein, 9 aa, Homo sapiens
HLAQWEPVL

SEQ ID NO: 4812 - protein, 9 aa, Homo sapiens
ASVPLLTHL

SEQ ID NO: 4813 - protein, 9 aa, Homo sapiens
THLAQWEPV

SEQ ID NO: 4814 - protein, 9 aa, Homo sapiens
TMYVCTPVP

SEQ ID NO: 4815 - protein, 9 aa, Homo sapiens
YVCTPVPHP

SEQ ID NO: 4816 - protein, 9 aa, Homo sapiens
MYVCTPVPH

SEQ ID NO: 4817 - protein, 9 aa, Homo sapiens
VCTPVPHPD

SEQ ID NO: 4818 - protein, 9 aa, Homo sapiens
CTPVPHPDP

SEQ ID NO: 4819 - protein, 9 aa, Homo sapiens
ASLTMYVCT

SEQ ID NO: 4820 - protein, 9 aa, Homo sapiens
SLTMYVCTP

SEQ ID NO: 4821 - protein, 9 aa, Homo sapiens
SRTPTRQIS

SEQ ID NO: 4822 - protein, 9 aa, Homo sapiens
ISSIDTDPP

SEQ ID NO: 4823 - protein, 9 aa, Homo sapiens
TPTRQISSI

SEQ ID NO: 4824 - protein, 9 aa, Homo sapiens
RQISSIDTD

SEQ ID NO: 4825 - protein, 9 aa, Homo sapiens
SSIDTDPPA

SEQ ID NO: 4826 - protein, 9 aa, Homo sapiens
PTRQISSID

SEQ ID NO: 4827 - protein, 9 aa, Homo sapiens
TRQISSIDT

SEQ ID NO: 4828 - protein, 9 aa, Homo sapiens
QISSIDTDP

SEQ ID NO: 4829 - protein, 9 aa, Homo sapiens
ISSSDTDPP

SEQ ID NO: 4830 - protein, 9 aa, Homo sapiens
SSSDTDPPA

SEQ ID NO: 4831 - protein, 9 aa, Homo sapiens
TPTRQISSS

SEQ ID NO: 4832 - protein, 9 aa, Homo sapiens
PTRQISSSD

SEQ ID NO: 4833 - protein, 9 aa, Homo sapiens
TRQISSSDT

SEQ ID NO: 4834 - protein, 9 aa, Homo sapiens
RQISSSDTD

SEQ ID NO: 4835 - protein, 9 aa, Homo sapiens
QISSSDTDP

SEQ ID NO: 4836 - protein, 9 aa, Homo sapiens
GSSDTDPPA

SEQ ID NO: 4837 - protein, 9 aa, Homo sapiens
IGSSDTDPP

SEQ ID NO: 4838 - protein, 9 aa, Homo sapiens
SSDTDPPAD

SEQ ID NO: 4839 - protein, 9 aa, Homo sapiens
SDTDPPADG

SEQ ID NO: 4840 - protein, 9 aa, Homo sapiens
TPTRQIGSS

SEQ ID NO: 4841 - protein, 9 aa, Homo sapiens
TRQIGSSDT

SEQ ID NO: 4842 - protein, 9 aa, Homo sapiens
RQIGSSDTD

SEQ ID NO: 4843 - protein, 9 aa, Homo sapiens
PTRQIGSSD

SEQ ID NO: 4844 - protein, 9 aa, Homo sapiens
SRGQALRRA

SEQ ID NO: 4845 - protein, 9 aa, Homo sapiens
RGQALRRAQ

SEQ ID NO: 4846 - protein, 9 aa, Homo sapiens
ARIRAVGLL

SEQ ID NO: 4847 - protein, 9 aa, Homo sapiens
RAVGLLTVI

SEQ ID NO: 4848 - protein, 9 aa, Homo sapiens
LALQPGTAL

SEQ ID NO: 4849 - protein, 9 aa, Homo sapiens
IRAVGLLTV

SEQ ID NO: 4850 - protein, 9 aa, Homo sapiens
VGLLTVISK

SEQ ID NO: 4851 - protein, 9 aa, Homo sapiens
AILALLPAL

SEQ ID NO: 4852 - protein, 9 aa, Homo sapiens
LALLPALGL

SEQ ID NO: 4853 - protein, 9 aa, Homo sapiens
KAVLLALLM

SEQ ID NO: 4854 - protein, 9 aa, Homo sapiens
ALQPGTALL

SEQ ID NO: 4855 - protein, 9 aa, Homo sapiens
LQVENCTQL

SEQ ID NO: 4856 - protein, 9 aa, Homo sapiens
ALLPALGLL

SEQ ID NO: 4857 - protein, 9 aa, Homo sapiens
LLLWGPGQL

SEQ ID NO: 4858 - protein, 9 aa, Homo sapiens
ALLMAGLAL

SEQ ID NO: 4859 - protein, 9 aa, Homo sapiens
TALLCYSCK

SEQ ID NO: 4860 - protein, 9 aa, Homo sapiens
LGEQCWTAR

SEQ ID NO: 4861 - protein, 9 aa, Homo sapiens
TVISKGCSL

SEQ ID NO: 4862 - protein, 9 aa, Homo sapiens
ALQPAAAIL

SEQ ID NO: 4863 - protein, 9 aa, Homo sapiens
QPAAAILAL

SEQ ID NO: 4864 - protein, 9 aa, Homo sapiens
MKAVLLALL

SEQ ID NO: 4865 - protein, 9 aa, Homo sapiens
LLALLMAGL

SEQ ID NO: 4866 - protein, 9 aa, Homo sapiens
SQDYYVGKK

SEQ ID NO: 4867 - protein, 9 aa, Homo sapiens
DYYVGKKNI

SEQ ID NO: 4868 - protein, 9 aa, Homo sapiens
NITCCDTDL

SEQ ID NO: 4869 - protein, 9 aa, Homo sapiens
CNASGAHAL

SEQ ID NO: 4870 - protein, 9 aa, Homo sapiens
HALQPAAAI

SEQ ID NO: 4871 - protein, 9 aa, Homo sapiens
PAAAILALL

SEQ ID NO: 4872 - protein, 9 aa, Homo sapiens
AQVSNEDCL

SEQ ID NO: 4873 - protein, 9 aa, Homo sapiens
GEQCWTARI

SEQ ID NO: 4874 - protein, 9 aa, Homo sapiens
TARIRAVGL

SEQ ID NO: 4875 - protein, 9 aa, Homo sapiens
GLLTVISKG

SEQ ID NO: 4876 - protein, 9 aa, Homo sapiens
LLPALGLLL

SEQ ID NO: 4877 - protein, 9 aa, Homo sapiens
EQCWTARIR

SEQ ID NO: 4878 - protein, 9 aa, Homo sapiens
CVDDSQDYY

SEQ ID NO: 4879 - protein, 9 aa, Homo sapiens
DSQDYYVGK

SEQ ID NO: 4880 - protein, 9 aa, Homo sapiens
HRTTTWARR

SEQ ID NO: 4881 - protein, 9 aa, Homo sapiens
RHLFPQEAF

SEQ ID NO: 4882 - protein, 9 aa, Homo sapiens
SRLPPSLRC

SEQ ID NO: 4883 - protein, 9 aa, Homo sapiens
RRTSRAVTP

SEQ ID NO: 4884 - protein, 9 aa, Homo sapiens
YRLWGAPLQ

SEQ ID NO: 4885 - protein, 9 aa, Homo sapiens
WGAPLQPTL

SEQ ID NO: 4886 - protein, 9 aa, Homo sapiens
APSRGQALR

SEQ ID NO: 4887 - protein, 9 aa, Homo sapiens
PSRGQALRR

SEQ ID NO: 4888 - protein, 9 aa, Homo sapiens
AGPMPCSRL

SEQ ID NO: 4889 - protein, 9 aa, Homo sapiens
SGDPASYRL

SEQ ID NO: 4890 - protein, 9 aa, Homo sapiens
PADGPSNPL

SEQ ID NO: 4891 - protein, 9 aa, Homo sapiens
AFSTLNPVL

SEQ ID NO: 4892 - protein, 9 aa, Homo sapiens
STLNPVLRH

SEQ ID NO: 4893 - protein, 9 aa, Homo sapiens
FPAHPIYDL

SEQ ID NO: 4894 - protein, 9 aa, Homo sapiens
SVVSPAPSR

SEQ ID NO: 4895 - protein, 9 aa, Homo sapiens
SRGQALRRA

SEQ ID NO: 4896 - protein, 9 aa, Homo sapiens
RGQALRRAR

SEQ ID NO: 4897 - protein, 9 aa, Homo sapiens
ARRTSRAVT

SEQ ID NO: 4898 - protein, 9 aa, Homo sapiens
VVPQASVPL

SEQ ID NO: 4899 - protein, 9 aa, Homo sapiens
HPAQWEPVL

SEQ ID NO: 4900 - protein, 9 aa, Homo sapiens
PEAHPNASL

SEQ ID NO: 4901 - protein, 9 aa, Homo sapiens
PDPPMALSR

SEQ ID NO: 4902 - protein, 9 aa, Homo sapiens
MALSRTPTR

SEQ ID NO: 4903 - protein, 9 aa, Homo sapiens
TRQIGSIDT

SEQ ID NO: 4904 - protein, 9 aa, Homo sapiens
TTWARRTSR

SEQ ID NO: 4905 - protein, 9 aa, Homo sapiens
PCSRLPPSL

SEQ ID NO: 4906 - protein, 9 aa, Homo sapiens
CSRLPPSLR

SEQ ID NO: 4907 - protein, 9 aa, Homo sapiens
CSGDPASYR

SEQ ID NO: 4908 - protein, 9 aa, Homo sapiens
VPQASVPLL

SEQ ID NO: 4909 - protein, 9 aa, Homo sapiens
RQIGSIDTD

SEQ ID NO: 4910 - protein, 9 aa, Homo sapiens
FHGPAFSTL

SEQ ID NO: 4911 - protein, 9 aa, Homo sapiens
TLNPVLRHL

SEQ ID NO: 4912 - protein, 9 aa, Homo sapiens
EAFPAHPIY

SEQ ID NO: 4913 - protein, 9 aa, Homo sapiens
SRAVTPTCA

SEQ ID NO: 4914 - protein, 9 aa, Homo sapiens
PAGPMPCSR

SEQ ID NO: 4915 - protein, 9 aa, Homo sapiens
LPPSLRCSL

SEQ ID NO: 4916 - protein, 9 aa, Homo sapiens
LRCSLHSAC

SEQ ID NO: 4917 - protein, 9 aa, Homo sapiens
CCSGDPASY

SEQ ID NO: 4918 - protein, 9 aa, Homo sapiens
SYRLWGAPL

SEQ ID NO: 4919 - protein, 9 aa, Homo sapiens
QASVPLLTH

SEQ ID NO: 4920 - protein, 9 aa, Homo sapiens
AHPNASLTM

SEQ ID NO: 4921 - protein, 9 aa, Homo sapiens
HPNASLTMY

SEQ ID NO: 4922 - protein, 9 aa, Homo sapiens
PHPDPPMAL

SEQ ID NO: 4923 - protein, 9 aa, Homo sapiens
PSNPLCCCF

SEQ ID NO: 4924 - protein, 9 aa, Homo sapiens
FSTLNPVLR

SEQ ID NO: 4925 - protein, 9 aa, Homo sapiens
LRHLFPQEA

SEQ ID NO: 4926 - protein, 9 aa, Homo sapiens
THRTTTWAR

SEQ ID NO: 4927 - protein, 9 aa, Homo sapiens
EPVLVPEAH

SEQ ID NO: 4928 - protein, 9 aa, Homo sapiens
PVPHPDPPM

SEQ ID NO: 4929 - protein, 9 aa, Homo sapiens
SRTPTRQIG

SEQ ID NO: 4930 - protein, 9 aa, Homo sapiens
CCCFHGPAF

SEQ ID NO: 4931 - protein, 9 aa, Homo sapiens
LNPVLRHLF

SEQ ID NO: 4932 - protein, 9 aa, Homo sapiens
SRLLPSLRC

SEQ ID NO: 4933 - protein, 9 aa, Homo sapiens
GPMPCSRLL

SEQ ID NO: 4934 - protein, 9 aa, Homo sapiens
PCSRLLPSL

SEQ ID NO: 4935 - protein, 9 aa, Homo sapiens
CSRLLPSLR

SEQ ID NO: 4936 - protein, 9 aa, Homo sapiens
LLPSLRCSL

SEQ ID NO: 4937 - protein, 9 aa, Homo sapiens
LPSLRCSLH

SEQ ID NO: 4938 - protein, 9 aa, Homo sapiens
RLLPSLRCS

SEQ ID NO: 4939 - protein, 9 aa, Homo sapiens
SRLWGAPLQ

SEQ ID NO: 4940 - protein, 9 aa, Homo sapiens
SGDPASSRL

SEQ ID NO: 4941 - protein, 9 aa, Homo sapiens
CSGDPASSR

SEQ ID NO: 4942 - protein, 9 aa, Homo sapiens
SSRLWGAPL

SEQ ID NO: 4943 - protein, 9 aa, Homo sapiens
DPAQWEPVL

SEQ ID NO: 4944 - protein, 9 aa, Homo sapiens
ASVPLLTDP

SEQ ID NO: 4945 - protein, 9 aa, Homo sapiens
ASVPLLTDL

SEQ ID NO: 4946 - protein, 9 aa, Homo sapiens
DLAQWEPVL

SEQ ID NO: 4947 - protein, 9 aa, Homo sapiens
ASVPLLTHL

SEQ ID NO: 4948 - protein, 9 aa, Homo sapiens
HLAQWEPVL

SEQ ID NO: 4949 - protein, 9 aa, Homo sapiens
MYVCTPVPH

SEQ ID NO: 4950 - protein, 9 aa, Homo sapiens
ASLTMYVCT

SEQ ID NO: 4951 - protein, 9 aa, Homo sapiens
TMYVCTPVP

SEQ ID NO: 4952 - protein, 9 aa, Homo sapiens
TRQISSIDT

SEQ ID NO: 4953 - protein, 9 aa, Homo sapiens
SRTPTRQIS

SEQ ID NO: 4954 - protein, 9 aa, Homo sapiens
TPTRQISSI

SEQ ID NO: 4955 - protein, 9 aa, Homo sapiens
RQISSIDTD

SEQ ID NO: 4956 - protein, 9 aa, Homo sapiens
RTPTRQISS

SEQ ID NO: 4957 - protein, 9 aa, Homo sapiens
TRQISSSDT

SEQ ID NO: 4958 - protein, 9 aa, Homo sapiens
RQISSSDTD

SEQ ID NO: 4959 - protein, 9 aa, Homo sapiens
PTRQISSSD

SEQ ID NO: 4960 - protein, 9 aa, Homo sapiens
TRQIGSSDT

SEQ ID NO: 4961 - protein, 9 aa, Homo sapiens
RQIGSSDTD

SEQ ID NO: 4962 - protein, 9 aa, Homo sapiens
SRGQALRRA

SEQ ID NO: 4963 - protein, 9 aa, Homo sapiens
ARIRAVGLL

SEQ ID NO: 4964 - protein, 9 aa, Homo sapiens
IRAVGLLTV

SEQ ID NO: 4965 - protein, 9 aa, Homo sapiens
ALLMAGLAL

SEQ ID NO: 4966 - protein, 9 aa, Homo sapiens
AILALLPAL

SEQ ID NO: 4967 - protein, 9 aa, Homo sapiens
LALLPALGL

SEQ ID NO: 4968 - protein, 9 aa, Homo sapiens
ALLPALGLL

SEQ ID NO: 4969 - protein, 9 aa, Homo sapiens
KAVLLALLM

SEQ ID NO: 4970 - protein, 9 aa, Homo sapiens
AQVSNEDCL

SEQ ID NO: 4971 - protein, 9 aa, Homo sapiens
RAVGLLTVI

SEQ ID NO: 4972 - protein, 9 aa, Homo sapiens
ALQPAAAIL

SEQ ID NO: 4973 - protein, 9 aa, Homo sapiens
LLLWGPGQL

SEQ ID NO: 4974 - protein, 9 aa, Homo sapiens
LALQPGTAL

SEQ ID NO: 4975 - protein, 9 aa, Homo sapiens
ALQPGTALL

SEQ ID NO: 4976 - protein, 9 aa, Homo sapiens
LCYSCKAQV

SEQ ID NO: 4977 - protein, 9 aa, Homo sapiens
LQVENCTQL

SEQ ID NO: 4978 - protein, 9 aa, Homo sapiens
GEQCWTARI

SEQ ID NO: 4979 - protein, 9 aa, Homo sapiens
TARIRAVGL

SEQ ID NO: 4980 - protein, 9 aa, Homo sapiens
TVISKGCSL

SEQ ID NO: 4981 - protein, 9 aa, Homo sapiens
CNASGAHAL

SEQ ID NO: 4982 - protein, 9 aa, Homo sapiens
VSNEDCLQV

SEQ ID NO: 4983 - protein, 9 aa, Homo sapiens
DYYVGKKNI

SEQ ID NO: 4984 - protein, 9 aa, Homo sapiens
NITCCDTDL

SEQ ID NO: 4985 - protein, 9 aa, Homo sapiens
HALQPAAAI

SEQ ID NO: 4986 - protein, 9 aa, Homo sapiens
QPAAAILAL

SEQ ID NO: 4987 - protein, 9 aa, Homo sapiens
PAAAILALL

SEQ ID NO: 4988 - protein, 9 aa, Homo sapiens
LLPALGLLL

SEQ ID NO: 4989 - protein, 9 aa, Homo sapiens
RRTSRAVTP

SEQ ID NO: 4990 - protein, 9 aa, Homo sapiens
SRLPPSLRC

SEQ ID NO: 4991 - protein, 9 aa, Homo sapiens
YRLWGAPLQ

SEQ ID NO: 4992 - protein, 9 aa, Homo sapiens
RHLFPQEAF

SEQ ID NO: 4993 - protein, 9 aa, Homo sapiens
SGDPASYRL

SEQ ID NO: 4994 - protein, 9 aa, Homo sapiens
HRTTTWARR

SEQ ID NO: 4995 - protein, 9 aa, Homo sapiens
AGPMPCSRL

SEQ ID NO: 4996 - protein, 9 aa, Homo sapiens
WGAPLQPTL

SEQ ID NO: 4997 - protein, 9 aa, Homo sapiens
APLQPTLGV

SEQ ID NO: 4998 - protein, 9 aa, Homo sapiens
VPQASVPLL

SEQ ID NO: 4999 - protein, 9 aa, Homo sapiens
SRTPTRQIG

SEQ ID NO: 5000 - protein, 9 aa, Homo sapiens
AFSTLNPVL

SEQ ID NO: 5001 - protein, 9 aa, Homo sapiens
YDLSQVWSV

SEQ ID NO: 5002 - protein, 9 aa, Homo sapiens
ARRTSRAVT

SEQ ID NO: 5003 - protein, 9 aa, Homo sapiens
PCSRLPPSL

SEQ ID NO: 5004 - protein, 9 aa, Homo sapiens
LPPSLRCSL

SEQ ID NO: 5005 - protein, 9 aa, Homo sapiens
LRCSLHSAC

SEQ ID NO: 5006 - protein, 9 aa, Homo sapiens
VVPQASVPL

SEQ ID NO: 5007 - protein, 9 aa, Homo sapiens
HPAQWEPVL

SEQ ID NO: 5008 - protein, 9 aa, Homo sapiens
FHGPAFSTL

SEQ ID NO: 5009 - protein, 9 aa, Homo sapiens
PAFSTLNPV

SEQ ID NO: 5010 - protein, 9 aa, Homo sapiens
TLNPVLRHL

SEQ ID NO: 5011 - protein, 9 aa, Homo sapiens
FPAHPIYDL

SEQ ID NO: 5012 - protein, 9 aa, Homo sapiens
HPIYDLSQV

SEQ ID NO: 5013 - protein, 9 aa, Homo sapiens
PAPSRGQAL

SEQ ID NO: 5014 - protein, 9 aa, Homo sapiens
SRGQALRRA

SEQ ID NO: 5015 - protein, 9 aa, Homo sapiens
SRAVTPTCA

SEQ ID NO: 5016 - protein, 9 aa, Homo sapiens
SYRLWGAPL

SEQ ID NO: 5017 - protein, 9 aa, Homo sapiens
PEAHPNASL

SEQ ID NO: 5018 - protein, 9 aa, Homo sapiens
AHPNASLTM

SEQ ID NO: 5019 - protein, 9 aa, Homo sapiens
PHPDPPMAL

SEQ ID NO: 5020 - protein, 9 aa, Homo sapiens
TRQIGSIDT

SEQ ID NO: 5021 - protein, 9 aa, Homo sapiens
PADGPSNPL

SEQ ID NO: 5022 - protein, 9 aa, Homo sapiens
LRHLFPQEA

SEQ ID NO: 5023 - protein, 9 aa, Homo sapiens
TCATPAGPM

SEQ ID NO: 5024 - protein, 9 aa, Homo sapiens
PLQPTLGVV

SEQ ID NO: 5025 - protein, 9 aa, Homo sapiens
LGVVPQASV

SEQ ID NO: 5026 - protein, 9 aa, Homo sapiens
PAQWEPVLV

SEQ ID NO: 5027 - protein, 9 aa, Homo sapiens
PNASLTMYV

SEQ ID NO: 5028 - protein, 9 aa, Homo sapiens
PVPHPDPPM

SEQ ID NO: 5029 - protein, 9 aa, Homo sapiens
LSRTPTRQI

SEQ ID NO: 5030 - protein, 9 aa, Homo sapiens
TPTRQIGSI

SEQ ID NO: 5031 - protein, 9 aa, Homo sapiens
PSNPLCCCF

SEQ ID NO: 5032 - protein, 9 aa, Homo sapiens
CCCFHGPAF

SEQ ID NO: 5033 - protein, 9 aa, Homo sapiens
QEAFPAHPI

SEQ ID NO: 5034 - protein, 9 aa, Homo sapiens
WARRTSRAV

SEQ ID NO: 5035 - protein, 9 aa, Homo sapiens
THPAQWEPV

SEQ ID NO: 5036 - protein, 9 aa, Homo sapiens
LTMYVCAPV

SEQ ID NO: 5037 - protein, 9 aa, Homo sapiens
LNPVLRHLF

SEQ ID NO: 5038 - protein, 9 aa, Homo sapiens
DLSQVWSVV

SEQ ID NO: 5039 - protein, 9 aa, Homo sapiens
GPMPCSRLL

SEQ ID NO: 5040 - protein, 9 aa, Homo sapiens
SRLLPSLRC

SEQ ID NO: 5041 - protein, 9 aa, Homo sapiens
PCSRLLPSL

SEQ ID NO: 5042 - protein, 9 aa, Homo sapiens
LLPSLRCSL

SEQ ID NO: 5043 - protein, 9 aa, Homo sapiens
RLLPSLRCS

SEQ ID NO: 5044 - protein, 9 aa, Homo sapiens
SRLWGAPLQ

SEQ ID NO: 5045 - protein, 9 aa, Homo sapiens
SGDPASSRL

SEQ ID NO: 5046 - protein, 9 aa, Homo sapiens
SSRLWGAPL

SEQ ID NO: 5047 - protein, 9 aa, Homo sapiens
DPAQWEPVL

SEQ ID NO: 5048 - protein, 9 aa, Homo sapiens
TDPAQWEPV

SEQ ID NO: 5049 - protein, 9 aa, Homo sapiens
ASVPLLTDL

SEQ ID NO: 5050 - protein, 9 aa, Homo sapiens
DLAQWEPVL

SEQ ID NO: 5051 - protein, 9 aa, Homo sapiens
TDLAQWEPV

SEQ ID NO: 5052 - protein, 9 aa, Homo sapiens
ASVPLLTHL

SEQ ID NO: 5053 - protein, 9 aa, Homo sapiens
HLAQWEPVL

SEQ ID NO: 5054 - protein, 9 aa, Homo sapiens
THLAQWEPV

SEQ ID NO: 5055 - protein, 9 aa, Homo sapiens
LAQWEPVLV

SEQ ID NO: 5056 - protein, 9 aa, Homo sapiens
LTMYVCTPV

SEQ ID NO: 5057 - protein, 9 aa, Homo sapiens
ASLTMYVCT

SEQ ID NO: 5058 - protein, 9 aa, Homo sapiens
TMYVCTPVP

SEQ ID NO: 5059 - protein, 9 aa, Homo sapiens
SRTPTRQIS

SEQ ID NO: 5060 - protein, 9 aa, Homo sapiens
TRQISSIDT

SEQ ID NO: 5061 - protein, 9 aa, Homo sapiens
TPTRQISSI

SEQ ID NO: 5062 - protein, 9 aa, Homo sapiens
RQISSIDTD

SEQ ID NO: 5063 - protein, 9 aa, Homo sapiens
TRQISSSDT

SEQ ID NO: 5064 - protein, 9 aa, Homo sapiens
RQISSSDTD

SEQ ID NO: 5065 - protein, 9 aa, Homo sapiens
TRQIGSSDT

SEQ ID NO: 5066 - protein, 9 aa, Homo sapiens
RQIGSSDTD

SEQ ID NO: 5067 - protein, 9 aa, Homo sapiens
GSSDTDPPA

SEQ ID NO: 5068 - protein, 9 aa, Homo sapiens
SRGQALRRA

SEQ ID NO: 5069 - protein, 9 aa, Homo sapiens
GEQCWTARI

SEQ ID NO: 5070 - protein, 9 aa, Homo sapiens
ARIRAVGLL

SEQ ID NO: 5071 - protein, 9 aa, Homo sapiens
ALLPALGLL

SEQ ID NO: 5072 - protein, 9 aa, Homo sapiens
ALQPGTALL

SEQ ID NO: 5073 - protein, 9 aa, Homo sapiens
ALLMAGLAL

SEQ ID NO: 5074 - protein, 9 aa, Homo sapiens
ALQPAAAIL

SEQ ID NO: 5075 - protein, 9 aa, Homo sapiens
AILALLPAL

SEQ ID NO: 5076 - protein, 9 aa, Homo sapiens
QPAAAILAL

SEQ ID NO: 5077 - protein, 9 aa, Homo sapiens
AQVSNEDCL

SEQ ID NO: 5078 - protein, 9 aa, Homo sapiens
CNASGAHAL

SEQ ID NO: 5079 - protein, 9 aa, Homo sapiens
LALLPALGL

SEQ ID NO: 5080 - protein, 9 aa, Homo sapiens
LPALGLLLW

SEQ ID NO: 5081 - protein, 9 aa, Homo sapiens
LALQPGTAL

SEQ ID NO: 5082 - protein, 9 aa, Homo sapiens
QPGTALLCY

SEQ ID NO: 5083 - protein, 9 aa, Homo sapiens
NEDCLQVEN

SEQ ID NO: 5084 - protein, 9 aa, Homo sapiens
TARIRAVGL

SEQ ID NO: 5085 - protein, 9 aa, Homo sapiens
TVISKGCSL

SEQ ID NO: 5086 - protein, 9 aa, Homo sapiens
PAAAILALL

SEQ ID NO: 5087 - protein, 9 aa, Homo sapiens
LLPALGLLL

SEQ ID NO: 5088 - protein, 9 aa, Homo sapiens
LLLWGPGQL

SEQ ID NO: 5089 - protein, 9 aa, Homo sapiens
MKAVLLALL

SEQ ID NO: 5090 - protein, 9 aa, Homo sapiens
LQVENCTQL

SEQ ID NO: 5091 - protein, 9 aa, Homo sapiens
NCVDDSQDY

SEQ ID NO: 5092 - protein, 9 aa, Homo sapiens
CVDDSQDYY

SEQ ID NO: 5093 - protein, 9 aa, Homo sapiens
HALQPAAAI

SEQ ID NO: 5094 - protein, 9 aa, Homo sapiens
LLALLMAGL

SEQ ID NO: 5095 - protein, 9 aa, Homo sapiens
VENCTQLGE

SEQ ID NO: 5096 - protein, 9 aa, Homo sapiens
CTQLGEQCW

SEQ ID NO: 5097 - protein, 9 aa, Homo sapiens
RAVGLLTVI

SEQ ID NO: 5098 - protein, 9 aa, Homo sapiens
NITCCDTDL

SEQ ID NO: 5099 - protein, 9 aa, Homo sapiens
DYYVGKKNI

SEQ ID NO: 5100 - protein, 9 aa, Homo sapiens
AAILALLPA

SEQ ID NO: 5101 - protein, 9 aa, Homo sapiens
PEAHPNASL

SEQ ID NO: 5102 - protein, 9 aa, Homo sapiens
QEAFPAHPI

SEQ ID NO: 5103 - protein, 9 aa, Homo sapiens
EAFPAHPIY

SEQ ID NO: 5104 - protein, 9 aa, Homo sapiens
AFSTLNPVL

SEQ ID NO: 5105 - protein, 9 aa, Homo sapiens
SGDPASYRL

SEQ ID NO: 5106 - protein, 9 aa, Homo sapiens
PHPDPPMAL

SEQ ID NO: 5107 - protein, 9 aa, Homo sapiens
FHGPAFSTL

SEQ ID NO: 5108 - protein, 9 aa, Homo sapiens
TLNPVLRHL

SEQ ID NO: 5109 - protein, 9 aa, Homo sapiens
AGPMPCSRL

SEQ ID NO: 5110 - protein, 9 aa, Homo sapiens
WGAPLQPTL

SEQ ID NO: 5111 - protein, 9 aa, Homo sapiens
PLLTHPAQW

SEQ ID NO: 5112 - protein, 9 aa, Homo sapiens
LNPVLRHLF

SEQ ID NO: 5113 - protein, 9 aa, Homo sapiens
PAPSRGQAL

SEQ ID NO: 5114 - protein, 9 aa, Homo sapiens
PCSRLPPSL

SEQ ID NO: 5115 - protein, 9 aa, Homo sapiens
CCSGDPASY

SEQ ID NO: 5116 - protein, 9 aa, Homo sapiens
GDPASYRLW

SEQ ID NO: 5117 - protein, 9 aa, Homo sapiens
PADGPSNPL

SEQ ID NO: 5118 - protein, 9 aa, Homo sapiens
PSNPLCCCF

SEQ ID NO: 5119 - protein, 9 aa, Homo sapiens
RHLFPQEAF

SEQ ID NO: 5120 - protein, 9 aa, Homo sapiens
FPAHPIYDL

SEQ ID NO: 5121 - protein, 9 aa, Homo sapiens
LPPSLRCSL

SEQ ID NO: 5122 - protein, 9 aa, Homo sapiens
SYRLWGAPL

SEQ ID NO: 5123 - protein, 9 aa, Homo sapiens
VVPQASVPL

SEQ ID NO: 5124 - protein, 9 aa, Homo sapiens
VPQASVPLL

SEQ ID NO: 5125 - protein, 9 aa, Homo sapiens
WEPVLVPEA

SEQ ID NO: 5126 - protein, 9 aa, Homo sapiens
LSRTPTRQI

SEQ ID NO: 5127 - protein, 9 aa, Homo sapiens
TPTRQIGSI

SEQ ID NO: 5128 - protein, 9 aa, Homo sapiens
CCCFHGPAF

SEQ ID NO: 5129 - protein, 9 aa, Homo sapiens
PIYDLSQVW

SEQ ID NO: 5130 - protein, 9 aa, Homo sapiens
HPAQWEPVL

SEQ ID NO: 5131 - protein, 9 aa, Homo sapiens
HPNASLTMY

SEQ ID NO: 5132 - protein, 9 aa, Homo sapiens
GPMPCSRLL

SEQ ID NO: 5133 - protein, 9 aa, Homo sapiens
PCSRLLPSL

SEQ ID NO: 5134 - protein, 9 aa, Homo sapiens
LLPSLRCSL

SEQ ID NO: 5135 - protein, 9 aa, Homo sapiens
RLLPSLRCS

SEQ ID NO: 5136 - protein, 9 aa, Homo sapiens
SGDPASSRL

SEQ ID NO: 5137 - protein, 9 aa, Homo sapiens
GDPASSRLW

SEQ ID NO: 5138 - protein, 9 aa, Homo sapiens
SSRLWGAPL

SEQ ID NO: 5139 - protein, 9 aa, Homo sapiens
ASSRLWGAP

SEQ ID NO: 5140 - protein, 9 aa, Homo sapiens
PLLTDPAQW

SEQ ID NO: 5141 - protein, 9 aa, Homo sapiens
DPAQWEPVL

SEQ ID NO: 5142 - protein, 9 aa, Homo sapiens
ASVPLLTDP

SEQ ID NO: 5143 - protein, 9 aa, Homo sapiens
ASVPLLTDL

SEQ ID NO: 5144 - protein, 9 aa, Homo sapiens
PLLTDLAQW

SEQ ID NO: 5145 - protein, 9 aa, Homo sapiens
DLAQWEPVL

SEQ ID NO: 5146 - protein, 9 aa, Homo sapiens
ASVPLLTHL

SEQ ID NO: 5147 - protein, 9 aa, Homo sapiens
PLLTHLAQW

SEQ ID NO: 5148 - protein, 9 aa, Homo sapiens
HLAQWEPVL

SEQ ID NO: 5149 - protein, 9 aa, Homo sapiens
ASLTMYVCT

SEQ ID NO: 5150 - protein, 9 aa, Homo sapiens
VCTPVPHPD

SEQ ID NO: 5151 - protein, 9 aa, Homo sapiens
SLTMYVCTP

SEQ ID NO: 5152 - protein, 9 aa, Homo sapiens
TMYVCTPVP

SEQ ID NO: 5153 - protein, 9 aa, Homo sapiens
MYVCTPVPH

SEQ ID NO: 5154 - protein, 9 aa, Homo sapiens
YVCTPVPHP

SEQ ID NO: 5155 - protein, 9 aa, Homo sapiens
TPTRQISSI

SEQ ID NO: 5156 - protein, 9 aa, Homo sapiens
RQISSIDTD

SEQ ID NO: 5157 - protein, 9 aa, Homo sapiens
SRTPTRQIS

SEQ ID NO: 5158 - protein, 9 aa, Homo sapiens
SSIDTDPPA

SEQ ID NO: 5159 - protein, 9 aa, Homo sapiens
TPTRQISSS

SEQ ID NO: 5160 - protein, 9 aa, Homo sapiens
RQISSSDTD

SEQ ID NO: 5161 - protein, 9 aa, Homo sapiens
SSSDTDPPA

SEQ ID NO: 5162 - protein, 9 aa, Homo sapiens
ISSSDTDPP

SEQ ID NO: 5163 - protein, 9 aa, Homo sapiens
PTRQISSSD

SEQ ID NO: 5164 - protein, 9 aa, Homo sapiens
QISSSDTDP

SEQ ID NO: 5165 - protein, 9 aa, Homo sapiens
SSDTDPPAD

SEQ ID NO: 5166 - protein, 9 aa, Homo sapiens
RQIGSSDTD

SEQ ID NO: 5167 - protein, 9 aa, Homo sapiens
TPTRQIGSS

SEQ ID NO: 5168 - protein, 9 aa, Homo sapiens
SDTDPPADG

SEQ ID NO: 5169 - protein, 9 aa, Homo sapiens
IGSSDTDPP

SEQ ID NO: 5170 - protein, 9 aa, Homo sapiens
RGQALRRAQ

SEQ ID NO: 5171 - protein, 9 aa, Homo sapiens
SRGQALRRA

SEQ ID NO: 5172 - protein, 9 aa, Homo sapiens
GPMPCSRLL

SEQ ID NO: 5173 - protein, 9 aa, Homo sapiens
MPCSRLLPS

SEQ ID NO: 5174 - protein, 9 aa, Homo sapiens
LPSLRCSLH

SEQ ID NO: 5175 - protein, 9 aa, Homo sapiens
LLPSLRCSL

SEQ ID NO: 5176 - protein, 9 aa, Homo sapiens
RAVGLLTVI

SEQ ID NO: 5177 - protein, 9 aa, Homo sapiens
HALQPAAAI

SEQ ID NO: 5178 - protein, 9 aa, Homo sapiens
LALLPALGL

SEQ ID NO: 5179 - protein, 9 aa, Homo sapiens
LALQPGTAL

SEQ ID NO: 5180 - protein, 9 aa, Homo sapiens
TARIRAVGL

SEQ ID NO: 5181 - protein, 9 aa, Homo sapiens
DYYVGKKNI

SEQ ID NO: 5182 - protein, 9 aa, Homo sapiens
QPAAAILAL

SEQ ID NO: 5183 - protein, 9 aa, Homo sapiens
PAAAILALL

SEQ ID NO: 5184 - protein, 9 aa, Homo sapiens
LALLMAGLA

SEQ ID NO: 5185 - protein, 9 aa, Homo sapiens
PALGLLLWG

SEQ ID NO: 5186 - protein, 9 aa, Homo sapiens
LCYSCKAQV

SEQ ID NO: 5187 - protein, 9 aa, Homo sapiens
IRAVGLLTV

SEQ ID NO: 5188 - protein, 9 aa, Homo sapiens
LPALGLLLW

SEQ ID NO: 5189 - protein, 9 aa, Homo sapiens
QPGTALLCY

SEQ ID NO: 5190 - protein, 9 aa, Homo sapiens
TALLCYSCK

SEQ ID NO: 5191 - protein, 9 aa, Homo sapiens
VGLLTVISK

SEQ ID NO: 5192 - protein, 9 aa, Homo sapiens
KAVLLALLM

SEQ ID NO: 5193 - protein, 9 aa, Homo sapiens
MAGLALQPG

SEQ ID NO: 5194 - protein, 9 aa, Homo sapiens
KAQVSNEDC

SEQ ID NO: 5195 - protein, 9 aa, Homo sapiens
VSNEDCLQV

SEQ ID NO: 5196 - protein, 9 aa, Homo sapiens
NASGAHALQ

SEQ ID NO: 5197 - protein, 9 aa, Homo sapiens
AAAILALLP

SEQ ID NO: 5198 - protein, 9 aa, Homo sapiens
AAILALLPA

SEQ ID NO: 5199 - protein, 9 aa, Homo sapiens
DPASSRLWG

SEQ ID NO: 5200 - protein, 9 aa, Homo sapiens
SGDPASSRL

SEQ ID NO: 5201 - protein, 9 aa, Homo sapiens
PASSRLWGA

SEQ ID NO: 5202 - protein, 9 aa, Homo sapiens
DPAQWEPVL

SEQ ID NO: 5203 - protein, 9 aa, Homo sapiens
QASVPLLTD

SEQ ID NO: 5204 - protein, 9 aa, Homo sapiens
VPLLTDPAQ

SEQ ID NO: 5205 - protein, 9 aa, Homo sapiens
TDPAQWEPV

SEQ ID NO: 5206 - protein, 9 aa, Homo sapiens
VPLLTDLAQ

SEQ ID NO: 5207 - protein, 9 aa, Homo sapiens
DLAQWEPVL

SEQ ID NO: 5208 - protein, 9 aa, Homo sapiens
TDLAQWEPV

SEQ ID NO: 5209 - protein, 9 aa, Homo sapiens
ASVPLLTDL

SEQ ID NO: 5210 - protein, 9 aa, Homo sapiens
LAQWEPVLV

SEQ ID NO: 5211 - protein, 9 aa, Homo sapiens
VPLLTHLAQ

SEQ ID NO: 5212 - protein, 9 aa, Homo sapiens
THLAQWEPV

SEQ ID NO: 5213 - protein, 9 aa, Homo sapiens
LTMYVCTPV

SEQ ID NO: 5214 - protein, 9 aa, Homo sapiens
TMYVCTPVP

SEQ ID NO: 5215 - protein, 9 aa, Homo sapiens
YVCTPVPHP

SEQ ID NO: 5216 - protein, 9 aa, Homo sapiens
TPTRQISSI

SEQ ID NO: 5217 - protein, 9 aa, Homo sapiens
TPTRQISSS

SEQ ID NO: 5218 - protein, 9 aa, Homo sapiens
TPTRQIGSS

SEQ ID NO: 5219 - protein, 9 aa, Homo sapiens
IGSSDTDPP

SEQ ID NO: 5220 - protein, 9 aa, Homo sapiens
RGQALRRAQ

SEQ ID NO: 5221 - protein, 9 aa, Homo sapiens
SRGQALRRA

SEQ ID NO: 5222 - protein, 10 aa, Homo sapiens
LQPGTALLCY

SEQ ID NO: 5223 - protein, 10 aa, Homo sapiens
QVENCTQLGE

SEQ ID NO: 5224 - protein, 10 aa, Homo sapiens
DTDLCNASGA

SEQ ID NO: 5225 - protein, 10 aa, Homo sapiens
LNCVDDSQDY

SEQ ID NO: 5226 - protein, 10 aa, Homo sapiens
NCVDDSQDYY

SEQ ID NO: 5227 - protein, 10 aa, Homo sapiens
SQDYYVGKKN

SEQ ID NO: 5228 - protein, 10 aa, Homo sapiens
ALLPALGLLL

SEQ ID NO: 5229 - protein, 10 aa, Homo sapiens
ALQPGTALLC

SEQ ID NO: 5230 - protein, 10 aa, Homo sapiens
SNEDCLQVEN

SEQ ID NO: 5231 - protein, 10 aa, Homo sapiens
VDDSQDYYVG

SEQ ID NO: 5232 - protein, 10 aa, Homo sapiens
ITCCDTDLCN

SEQ ID NO: 5233 - protein, 10 aa, Homo sapiens
ALQPAAAILA

SEQ ID NO: 5234 - protein, 10 aa, Homo sapiens
NEDCLQVENC

SEQ ID NO: 5235 - protein, 10 aa, Homo sapiens
LGEQCWTARI

SEQ ID NO: 5236 - protein, 10 aa, Homo sapiens
ARIRAVGLLT

SEQ ID NO: 5237 - protein, 10 aa, Homo sapiens
CVDDSQDYYV

SEQ ID NO: 5238 - protein, 10 aa, Homo sapiens
CCDTDLCNAS

SEQ ID NO: 5239 - protein, 10 aa, Homo sapiens
HPDPPMALSR

SEQ ID NO: 5240 - protein, 10 aa, Homo sapiens
DTDPPADGPS

SEQ ID NO: 5241 - protein, 10 aa, Homo sapiens
SGDPASYRLW

SEQ ID NO: 5242 - protein, 10 aa, Homo sapiens
AHPNASLTMY

SEQ ID NO: 5243 - protein, 10 aa, Homo sapiens
ACCSGDPASY

SEQ ID NO: 5244 - protein, 10 aa, Homo sapiens
QWEPVLVPEA

SEQ ID NO: 5245 - protein, 10 aa, Homo sapiens
QEAFPAHPIY

SEQ ID NO: 5246 - protein, 10 aa, Homo sapiens
PADGPSNPLC

SEQ ID NO: 5247 - protein, 10 aa, Homo sapiens
VPEAHPNASL

SEQ ID NO: 5248 - protein, 10 aa, Homo sapiens
SIDTDPPADG

SEQ ID NO: 5249 - protein, 10 aa, Homo sapiens
FSTLNPVLRH

SEQ ID NO: 5250 - protein, 10 aa, Homo sapiens
GPMPCSRLPP

SEQ ID NO: 5251 - protein, 10 aa, Homo sapiens
ADGPSNPLCC

SEQ ID NO: 5252 - protein, 10 aa, Homo sapiens
IYDLSQVWSV

SEQ ID NO: 5253 - protein, 10 aa, Homo sapiens
CSRLPPSLRC

SEQ ID NO: 5254 - protein, 10 aa, Homo sapiens
LTHPAQWEPV

SEQ ID NO: 5255 - protein, 10 aa, Homo sapiens
EAHPNASLTM

SEQ ID NO: 5256 - protein, 10 aa, Homo sapiens
SRTPTRQIGS

SEQ ID NO: 5257 - protein, 10 aa, Homo sapiens
PTRQIGSIDT

SEQ ID NO: 5258 - protein, 10 aa, Homo sapiens
PQEAFPAHPI

SEQ ID NO: 5259 - protein, 10 aa, Homo sapiens
PAHPIYDLSQ

SEQ ID NO: 5260 - protein, 10 aa, Homo sapiens
VPQASVPLLT

SEQ ID NO: 5261 - protein, 10 aa, Homo sapiens
ASVPLLTHPA

SEQ ID NO: 5262 - protein, 10 aa, Homo sapiens
GPMPCSRLLP

SEQ ID NO: 5263 - protein, 10 aa, Homo sapiens
CSRLLPSLRC

SEQ ID NO: 5264 - protein, 10 aa, Homo sapiens
PMPCSRLLPS

SEQ ID NO: 5265 - protein, 10 aa, Homo sapiens
RLLPSLRCSL

SEQ ID NO: 5266 - protein, 10 aa, Homo sapiens
LPSLRCSLHS

SEQ ID NO: 5267 - protein, 10 aa, Homo sapiens
SGDPASSRLW

SEQ ID NO: 5268 - protein, 10 aa, Homo sapiens
SSRLWGAPLQ

SEQ ID NO: 5269 - protein, 10 aa, Homo sapiens
SRLWGAPLQP

SEQ ID NO: 5270 - protein, 10 aa, Homo sapiens
LTDPAQWEPV

SEQ ID NO: 5271 - protein, 10 aa, Homo sapiens
ASVPLLTDPA

SEQ ID NO: 5272 - protein, 10 aa, Homo sapiens
LTDLAQWEPV

SEQ ID NO: 5273 - protein, 10 aa, Homo sapiens
ASVPLLTDLA

SEQ ID NO: 5274 - protein, 10 aa, Homo sapiens
SVPLLTDLAQ

SEQ ID NO: 5275 - protein, 10 aa, Homo sapiens
ASVPLLTHLA

SEQ ID NO: 5276 - protein, 10 aa, Homo sapiens
SVPLLTHLAQ

SEQ ID NO: 5277 - protein, 10 aa, Homo sapiens
LAQWEPVLVP

SEQ ID NO: 5278 - protein, 10 aa, Homo sapiens
LTHLAQWEPV

SEQ ID NO: 5279 - protein, 10 aa, Homo sapiens
LTMYVCTPVP

SEQ ID NO: 5280 - protein, 10 aa, Homo sapiens
ASLTMYVCTP

SEQ ID NO: 5281 - protein, 10 aa, Homo sapiens
CTPVPHPDPP

SEQ ID NO: 5282 - protein, 10 aa, Homo sapiens
VCTPVPHPDP

SEQ ID NO: 5283 - protein, 10 aa, Homo sapiens
TPVPHPDPPM

SEQ ID NO: 5284 - protein, 10 aa, Homo sapiens
SLTMYVCTPV

SEQ ID NO: 5285 - protein, 10 aa, Homo sapiens
SRTPTRQISS

SEQ ID NO: 5286 - protein, 10 aa, Homo sapiens
PTRQISSIDT

SEQ ID NO: 5287 - protein, 10 aa, Homo sapiens
RTPTRQISSI

SEQ ID NO: 5288 - protein, 10 aa, Homo sapiens
SSIDTDPPAD

SEQ ID NO: 5289 - protein, 10 aa, Homo sapiens
LSRTPTRQIS

SEQ ID NO: 5290 - protein, 10 aa, Homo sapiens
ISSIDTDPPA

SEQ ID NO: 5291 - protein, 10 aa, Homo sapiens
RTPTRQISSS

SEQ ID NO: 5292 - protein, 10 aa, Homo sapiens
PTRQISSSDT

SEQ ID NO: 5293 - protein, 10 aa, Homo sapiens
SSSDTDPPAD

SEQ ID NO: 5294 - protein, 10 aa, Homo sapiens
ISSSDTDPPA

SEQ ID NO: 5295 - protein, 10 aa, Homo sapiens
SSDTDPPADG

SEQ ID NO: 5296 - protein, 10 aa, Homo sapiens
PSRGQALRRA

SEQ ID NO: 5297 - protein, 10 aa, Homo sapiens
SRGQALRRAQ

SEQ ID NO: 5298 - protein, 10 aa, Homo sapiens
ALLPALGLLL

SEQ ID NO: 5299 - protein, 10 aa, Homo sapiens
VLLALLMAGL

SEQ ID NO: 5300 - protein, 10 aa, Homo sapiens
ILALLPALGL

SEQ ID NO: 5301 - protein, 10 aa, Homo sapiens
RIRAVGLLTV

SEQ ID NO: 5302 - protein, 10 aa, Homo sapiens
GLALQPGTAL

SEQ ID NO: 5303 - protein, 10 aa, Homo sapiens
AAILALLPAL

SEQ ID NO: 5304 - protein, 10 aa, Homo sapiens
LLCYSCKAQV

SEQ ID NO: 5305 - protein, 10 aa, Homo sapiens
GLLLWGPGQL

SEQ ID NO: 5306 - protein, 10 aa, Homo sapiens
LALLPALGLL

SEQ ID NO: 5307 - protein, 10 aa, Homo sapiens
LALLMAGLAL

SEQ ID NO: 5308 - protein, 10 aa, Homo sapiens
ALLMAGLALQ

SEQ ID NO: 5309 - protein, 10 aa, Homo sapiens
LALQPGTALL

SEQ ID NO: 5310 - protein, 10 aa, Homo sapiens
CLQVENCTQL

SEQ ID NO: 5311 - protein, 10 aa, Homo sapiens
WTARIRAVGL

SEQ ID NO: 5312 - protein, 10 aa, Homo sapiens
LLALLMAGLA

SEQ ID NO: 5313 - protein, 10 aa, Homo sapiens
LMAGLALQPG

SEQ ID NO: 5314 - protein, 10 aa, Homo sapiens
TARIRAVGLL

SEQ ID NO: 5315 - protein, 10 aa, Homo sapiens
LTVISKGCSL

SEQ ID NO: 5316 - protein, 10 aa, Homo sapiens
ISKGCSLNCV

SEQ ID NO: 5317 - protein, 10 aa, Homo sapiens
HALQPAAAIL

SEQ ID NO: 5318 - protein, 10 aa, Homo sapiens
ALQPAAAILA

SEQ ID NO: 5319 - protein, 10 aa, Homo sapiens
LQPAAAILAL

SEQ ID NO: 5320 - protein, 10 aa, Homo sapiens
QPAAAILALL

SEQ ID NO: 5321 - protein, 10 aa, Homo sapiens
AAAILALLPA

SEQ ID NO: 5322 - protein, 10 aa, Homo sapiens
LLPALGLLLW

SEQ ID NO: 5323 - protein, 10 aa, Homo sapiens
QCWTARIRAV

SEQ ID NO: 5324 - protein, 10 aa, Homo sapiens
IRAVGLLTVI

SEQ ID NO: 5325 - protein, 10 aa, Homo sapiens
CVDDSQDYYV

SEQ ID NO: 5326 - protein, 10 aa, Homo sapiens
ALQPGTALLC

SEQ ID NO: 5327 - protein, 10 aa, Homo sapiens
KAQVSNEDCL

SEQ ID NO: 5328 - protein, 10 aa, Homo sapiens
QVSNEDCLQV

SEQ ID NO: 5329 - protein, 10 aa, Homo sapiens
DLCNASGAHA

SEQ ID NO: 5330 - protein, 10 aa, Homo sapiens
LCNASGAHAL

SEQ ID NO: 5331 - protein, 10 aa, Homo sapiens
AHALQPAAAI

SEQ ID NO: 5332 - protein, 10 aa, Homo sapiens
KAVLLALLMA

SEQ ID NO: 5333 - protein, 10 aa, Homo sapiens
LLMAGLALQP

SEQ ID NO: 5334 - protein, 10 aa, Homo sapiens
ALLCYSCKAQ

SEQ ID NO: 5335 - protein, 10 aa, Homo sapiens
AILALLPALG

SEQ ID NO: 5336 - protein, 10 aa, Homo sapiens
AVLLALLMAG

SEQ ID NO: 5337 - protein, 10 aa, Homo sapiens
QLGEQCWTAR

SEQ ID NO: 5338 - protein, 10 aa, Homo sapiens
GLLTVISKGC

SEQ ID NO: 5339 - protein, 10 aa, Homo sapiens
SLNCVDDSQD

SEQ ID NO: 5340 - protein, 10 aa, Homo sapiens
KNITCCDTDL

SEQ ID NO: 5341 - protein, 10 aa, Homo sapiens
RLPPSLRCSL

SEQ ID NO: 5342 - protein, 10 aa, Homo sapiens
TLGVVPQASV

SEQ ID NO: 5343 - protein, 10 aa, Homo sapiens
SLTMYVCAPV

SEQ ID NO: 5344 - protein, 10 aa, Homo sapiens
STLNPVLRHL

SEQ ID NO: 5345 - protein, 10 aa, Homo sapiens
RLWGAPLQPT

SEQ ID NO: 5346 - protein, 10 aa, Homo sapiens
VVPQASVPLL

SEQ ID NO: 5347 - protein, 10 aa, Homo sapiens
ALSRTPTRQI

SEQ ID NO: 5348 - protein, 10 aa, Homo sapiens
GVVPQASVPL

SEQ ID NO: 5349 - protein, 10 aa, Homo sapiens
APLQPTLGVV

SEQ ID NO: 5350 - protein, 10 aa, Homo sapiens
LTHPAQWEPV

SEQ ID NO: 5351 - protein, 10 aa, Homo sapiens
VLVPEAHPNA

SEQ ID NO: 5352 - protein, 10 aa, Homo sapiens
RTPTRQIGSI

SEQ ID NO: 5353 - protein, 10 aa, Homo sapiens
IYDLSQVWSV

SEQ ID NO: 5354 - protein, 10 aa, Homo sapiens
GAPLQPTLGV

SEQ ID NO: 5355 - protein, 10 aa, Homo sapiens
GPAFSTLNPV

SEQ ID NO: 5356 - protein, 10 aa, Homo sapiens
VLRHLFPQEA

SEQ ID NO: 5357 - protein, 10 aa, Homo sapiens
HLFPQEAFPA

SEQ ID NO: 5358 - protein, 10 aa, Homo sapiens
AFPAHPIYDL

SEQ ID NO: 5359 - protein, 10 aa, Homo sapiens
SPAPSRGQAL

SEQ ID NO: 5360 - protein, 10 aa, Homo sapiens
AHPIYDLSQV

SEQ ID NO: 5361 - protein, 10 aa, Homo sapiens
ASYRLWGAPL

SEQ ID NO: 5362 - protein, 10 aa, Homo sapiens
LWGAPLQPTL

SEQ ID NO: 5363 - protein, 10 aa, Homo sapiens
HPAQWEPVLV

SEQ ID NO: 5364 - protein, 10 aa, Homo sapiens
VPEAHPNASL

SEQ ID NO: 5365 - protein, 10 aa, Homo sapiens
VPHPDPPMAL

SEQ ID NO: 5366 - protein, 10 aa, Homo sapiens
CFHGPAFSTL

SEQ ID NO: 5367 - protein, 10 aa, Homo sapiens
TLNPVLRHLF

SEQ ID NO: 5368 - protein, 10 aa, Homo sapiens
YDLSQVWSVV

SEQ ID NO: 5369 - protein, 10 aa, Homo sapiens
TWARRTSRAV

SEQ ID NO: 5370 - protein, 10 aa, Homo sapiens
PAGPMPCSRL

SEQ ID NO: 5371 - protein, 10 aa, Homo sapiens
MPCSRLPPSL

SEQ ID NO: 5372 - protein, 10 aa, Homo sapiens
SLRCSLHSAC

SEQ ID NO: 5373 - protein, 10 aa, Homo sapiens
SLHSACCSGD

SEQ ID NO: 5374 - protein, 10 aa, Homo sapiens
LLTHPAQWEP

SEQ ID NO: 5375 - protein, 10 aa, Homo sapiens
PAFSTLNPVL

SEQ ID NO: 5376 - protein, 10 aa, Homo sapiens
CSGDPASYRL

SEQ ID NO: 5377 - protein, 10 aa, Homo sapiens
QWEPVLVPEA

SEQ ID NO: 5378 - protein, 10 aa, Homo sapiens
SIDTDPPADG

SEQ ID NO: 5379 - protein, 10 aa, Homo sapiens
AVTPTCATPA

SEQ ID NO: 5380 - protein, 10 aa, Homo sapiens
PLQPTLGVVP

SEQ ID NO: 5381 - protein, 10 aa, Homo sapiens
THPAQWEPVL

SEQ ID NO: 5382 - protein, 10 aa, Homo sapiens
AQWEPVLVPE

SEQ ID NO: 5383 - protein, 10 aa, Homo sapiens
HPNASLTMYV

SEQ ID NO: 5384 - protein, 10 aa, Homo sapiens
TMYVCAPVPH

SEQ ID NO: 5385 - protein, 10 aa, Homo sapiens
PPADGPSNPL

SEQ ID NO: 5386 - protein, 10 aa, Homo sapiens
PLCCCFHGPA

SEQ ID NO: 5387 - protein, 10 aa, Homo sapiens
DLSQVWSVVS

SEQ ID NO: 5388 - protein, 10 aa, Homo sapiens
RLLPSLRCSL

SEQ ID NO: 5389 - protein, 10 aa, Homo sapiens
MPCSRLLPSL

SEQ ID NO: 5390 - protein, 10 aa, Homo sapiens
AGPMPCSRLL

SEQ ID NO: 5391 - protein, 10 aa, Homo sapiens
LLPSLRCSLH

SEQ ID NO: 5392 - protein, 10 aa, Homo sapiens
ASSRLWGAPL

SEQ ID NO: 5393 - protein, 10 aa, Homo sapiens
CSGDPASSRL

SEQ ID NO: 5394 - protein, 10 aa, Homo sapiens
DPASSRLWGA

SEQ ID NO: 5395 - protein, 10 aa, Homo sapiens
ACCSGDPASS

SEQ ID NO: 5396 - protein, 10 aa, Homo sapiens
LTDPAQWEPV

SEQ ID NO: 5397 - protein, 10 aa, Homo sapiens
LLTDPAQWEP

SEQ ID NO: 5398 - protein, 10 aa, Homo sapiens
DPAQWEPVLV

SEQ ID NO: 5399 - protein, 10 aa, Homo sapiens
TDPAQWEPVL

SEQ ID NO: 5400 - protein, 10 aa, Homo sapiens
PLLTDPAQWE

SEQ ID NO: 5401 - protein, 10 aa, Homo sapiens
QASVPLLTDP

SEQ ID NO: 5402 - protein, 10 aa, Homo sapiens
ASVPLLTDPA

SEQ ID NO: 5403 - protein, 10 aa, Homo sapiens
SVPLLTDPAQ

SEQ ID NO: 5404 - protein, 10 aa, Homo sapiens
DLAQWEPVLV

SEQ ID NO: 5405 - protein, 10 aa, Homo sapiens
QASVPLLTDL

SEQ ID NO: 5406 - protein, 10 aa, Homo sapiens
LTDLAQWEPV

SEQ ID NO: 5407 - protein, 10 aa, Homo sapiens
LLTDLAQWEP

SEQ ID NO: 5408 - protein, 10 aa, Homo sapiens
TDLAQWEPVL

SEQ ID NO: 5409 - protein, 10 aa, Homo sapiens
HLAQWEPVLV

SEQ ID NO: 5410 - protein, 10 aa, Homo sapiens
QASVPLLTHL

SEQ ID NO: 5411 - protein, 10 aa, Homo sapiens
LTHLAQWEPV

SEQ ID NO: 5412 - protein, 10 aa, Homo sapiens
LLTHLAQWEP

SEQ ID NO: 5413 - protein, 10 aa, Homo sapiens
THLAQWEPVL

SEQ ID NO: 5414 - protein, 10 aa, Homo sapiens
LAQWEPVLVP

SEQ ID NO: 5415 - protein, 10 aa, Homo sapiens
SLTMYVCTPV

SEQ ID NO: 5416 - protein, 10 aa, Homo sapiens
TMYVCTPVPH

SEQ ID NO: 5417 - protein, 10 aa, Homo sapiens
NASLTMYVCT

SEQ ID NO: 5418 - protein, 10 aa, Homo sapiens
ASLTMYVCTP

SEQ ID NO: 5419 - protein, 10 aa, Homo sapiens
RTPTRQISSI

SEQ ID NO: 5420 - protein, 10 aa, Homo sapiens
QISSIDTDPP

SEQ ID NO: 5421 - protein, 10 aa, Homo sapiens
RTPTRQISSS

SEQ ID NO: 5422 - protein, 10 aa, Homo sapiens
QISSSDTDPP

SEQ ID NO: 5423 - protein, 10 aa, Homo sapiens
ISSSDTDPPA

SEQ ID NO: 5424 - protein, 10 aa, Homo sapiens
PTRQISSSDT

SEQ ID NO: 5425 - protein, 10 aa, Homo sapiens
SSSDTDPPAD

SEQ ID NO: 5426 - protein, 10 aa, Homo sapiens
RTPTRQIGSS

SEQ ID NO: 5427 - protein, 10 aa, Homo sapiens
QIGSSDTDPP

SEQ ID NO: 5428 - protein, 10 aa, Homo sapiens
IGSSDTDPPA

SEQ ID NO: 5429 - protein, 10 aa, Homo sapiens
PTRQIGSSDT

SEQ ID NO: 5430 - protein, 10 aa, Homo sapiens
RQIGSSDTDP

SEQ ID NO: 5431 - protein, 10 aa, Homo sapiens
GSSDTDPPAD

SEQ ID NO: 5432 - protein, 10 aa, Homo sapiens
SSDTDPPADG

SEQ ID NO: 5433 - protein, 10 aa, Homo sapiens
PSRGQALRRA

SEQ ID NO: 5434 - protein, 10 aa, Homo sapiens
SRGQALRRAQ

SEQ ID NO: 5435 - protein, 10 aa, Homo sapiens
GAHALQPAAA

SEQ ID NO: 5436 - protein, 10 aa, Homo sapiens
SGAHALQPAA

SEQ ID NO: 5437 - protein, 10 aa, Homo sapiens
DLCNASGAHA

SEQ ID NO: 5438 - protein, 10 aa, Homo sapiens
AHALQPAAAI

SEQ ID NO: 5439 - protein, 10 aa, Homo sapiens
TTWARRTSRA

SEQ ID NO: 5440 - protein, 10 aa, Homo sapiens
TSRAVTPTCA

SEQ ID NO: 5441 - protein, 10 aa, Homo sapiens
AVTPTCATPA

SEQ ID NO: 5442 - protein, 10 aa, Homo sapiens
PSLRCSLHSA

SEQ ID NO: 5443 - protein, 10 aa, Homo sapiens
HSACCSGDPA

SEQ ID NO: 5444 - protein, 10 aa, Homo sapiens
DPASYRLWGA

SEQ ID NO: 5445 - protein, 10 aa, Homo sapiens
QPTLGVVPQA

SEQ ID NO: 5446 - protein, 10 aa, Homo sapiens
ASVPLLTHPA

SEQ ID NO: 5447 - protein, 10 aa, Homo sapiens
QWEPVLVPEA

SEQ ID NO: 5448 - protein, 10 aa, Homo sapiens
VLVPEAHPNA

SEQ ID NO: 5449 - protein, 10 aa, Homo sapiens
NASLTMYVCA

SEQ ID NO: 5450 - protein, 10 aa, Homo sapiens
PVPHPDPPMA

SEQ ID NO: 5451 - protein, 10 aa, Homo sapiens
IGSIDTDPPA

SEQ ID NO: 5452 - protein, 10 aa, Homo sapiens
PLCCCFHGPA

SEQ ID NO: 5453 - protein, 10 aa, Homo sapiens
VLRHLFPQEA

SEQ ID NO: 5454 - protein, 10 aa, Homo sapiens
HLFPQEAFPA

SEQ ID NO: 5455 - protein, 10 aa, Homo sapiens
SQVWSVVSPA

SEQ ID NO: 5456 - protein, 10 aa, Homo sapiens
VSPAPSRGQA

SEQ ID NO: 5457 - protein, 10 aa, Homo sapiens
PSRGQALRRA

SEQ ID NO: 5458 - protein, 10 aa, Homo sapiens
MTHRTTTWAR

SEQ ID NO: 5459 - protein, 10 aa, Homo sapiens
TWARRTSRAV

SEQ ID NO: 5460 - protein, 10 aa, Homo sapiens
SRAVTPTCAT

SEQ ID NO: 5461 - protein, 10 aa, Homo sapiens
VTPTCATPAG

SEQ ID NO: 5462 - protein, 10 aa, Homo sapiens
SLRCSLHSAC

SEQ ID NO: 5463 - protein, 10 aa, Homo sapiens
SACCSGDPAS

SEQ ID NO: 5464 - protein, 10 aa, Homo sapiens
PASYRLWGAP

SEQ ID NO: 5465 - protein, 10 aa, Homo sapiens
PTLGVVPQAS

SEQ ID NO: 5466 - protein, 10 aa, Homo sapiens
SVPLLTHPAQ

SEQ ID NO: 5467 - protein, 10 aa, Homo sapiens
WEPVLVPEAH

SEQ ID NO: 5468 - protein, 10 aa, Homo sapiens
LVPEAHPNAS

SEQ ID NO: 5469 - protein, 10 aa, Homo sapiens
ASLTMYVCAP

SEQ ID NO: 5470 - protein, 10 aa, Homo sapiens
VPHPDPPMAL

SEQ ID NO: 5471 - protein, 10 aa, Homo sapiens
GSIDTDPPAD

SEQ ID NO: 5472 - protein, 10 aa, Homo sapiens
LCCCFHGPAF

SEQ ID NO: 5473 - protein, 10 aa, Homo sapiens
LRHLFPQEAF

SEQ ID NO: 5474 - protein, 10 aa, Homo sapiens
LFPQEAFPAH

SEQ ID NO: 5475 - protein, 10 aa, Homo sapiens
QVWSVVSPAP

SEQ ID NO: 5476 - protein, 10 aa, Homo sapiens
SPAPSRGQAL

SEQ ID NO: 5477 - protein, 10 aa, Homo sapiens
SRGQALRRAR

SEQ ID NO: 5478 - protein, 10 aa, Homo sapiens
THRTTTWARR

SEQ ID NO: 5479 - protein, 10 aa, Homo sapiens
WARRTSRAVT

SEQ ID NO: 5480 - protein, 10 aa, Homo sapiens
RAVTPTCATP

SEQ ID NO: 5481 - protein, 10 aa, Homo sapiens
TPTCATPAGP

SEQ ID NO: 5482 - protein, 10 aa, Homo sapiens
LRCSLHSACC

SEQ ID NO: 5483 - protein, 10 aa, Homo sapiens
ACCSGDPASY

SEQ ID NO: 5484 - protein, 10 aa, Homo sapiens
ASYRLWGAPL

SEQ ID NO: 5485 - protein, 10 aa, Homo sapiens
TLGVVPQASV

SEQ ID NO: 5486 - protein, 10 aa, Homo sapiens
VPLLTHPAQW

SEQ ID NO: 5487 - protein, 10 aa, Homo sapiens
EPVLVPEAHP

SEQ ID NO: 5488 - protein, 10 aa, Homo sapiens
VPEAHPNASL

SEQ ID NO: 5489 - protein, 10 aa, Homo sapiens
SLTMYVCAPV

SEQ ID NO: 5490 - protein, 10 aa, Homo sapiens
PHPDPPMALS

SEQ ID NO: 5491 - protein, 10 aa, Homo sapiens
SIDTDPPADG

SEQ ID NO: 5492 - protein, 10 aa, Homo sapiens
CCCFHGPAFS

SEQ ID NO: 5493 - protein, 10 aa, Homo sapiens
RHLFPQEAFP

SEQ ID NO: 5494 - protein, 10 aa, Homo sapiens
FPQEAFPAHP

SEQ ID NO: 5495 - protein, 10 aa, Homo sapiens
VWSVVSPAPS

SEQ ID NO: 5496 - protein, 10 aa, Homo sapiens
PAPSRGQALR

SEQ ID NO: 5497 - protein, 10 aa, Homo sapiens
DPASSRLWGA

SEQ ID NO: 5498 - protein, 10 aa, Homo sapiens
PASSRLWGAP

SEQ ID NO: 5499 - protein, 10 aa, Homo sapiens
ACCSGDPASS

SEQ ID NO: 5500 - protein, 10 aa, Homo sapiens
ASSRLWGAPL

SEQ ID NO: 5501 - protein, 10 aa, Homo sapiens
ASVPLLTDPA

SEQ ID NO: 5502 - protein, 10 aa, Homo sapiens
SVPLLTDPAQ

SEQ ID NO: 5503 - protein, 10 aa, Homo sapiens
VPLLTDPAQW

SEQ ID NO: 5504 - protein, 10 aa, Homo sapiens
ASVPLLTDLA

SEQ ID NO: 5505 - protein, 10 aa, Homo sapiens
SVPLLTDLAQ

SEQ ID NO: 5506 - protein, 10 aa, Homo sapiens
VPLLTDLAQW

SEQ ID NO: 5507 - protein, 10 aa, Homo sapiens
ASVPLLTHLA

SEQ ID NO: 5508 - protein, 10 aa, Homo sapiens
SVPLLTHLAQ

SEQ ID NO: 5509 - protein, 10 aa, Homo sapiens
VPLLTHLAQW

SEQ ID NO: 5510 - protein, 10 aa, Homo sapiens
ISSIDTDPPA

SEQ ID NO: 5511 - protein, 10 aa, Homo sapiens
SSIDTDPPAD

SEQ ID NO: 5512 - protein, 10 aa, Homo sapiens
ISSSDTDPPA

SEQ ID NO: 5513 - protein, 10 aa, Homo sapiens
SSSDTDPPAD

SEQ ID NO: 5514 - protein, 10 aa, Homo sapiens
IGSSDTDPPA

SEQ ID NO: 5515 - protein, 10 aa, Homo sapiens
GSSDTDPPAD

SEQ ID NO: 5516 - protein, 10 aa, Homo sapiens
SSDTDPPADG

SEQ ID NO: 5517 - protein, 10 aa, Homo sapiens
PSRGQALRRA

SEQ ID NO: 5518 - protein, 10 aa, Homo sapiens
SRGQALRRAQ

SEQ ID NO: 5519 - protein, 10 aa, Homo sapiens
AVGLLTVISK

SEQ ID NO: 5520 - protein, 10 aa, Homo sapiens
RIRAVGLLTV

SEQ ID NO: 5521 - protein, 10 aa, Homo sapiens
ALLPALGLLL

SEQ ID NO: 5522 - protein, 10 aa, Homo sapiens
ALQPGTALLC

SEQ ID NO: 5523 - protein, 10 aa, Homo sapiens
LLMAGLALQP

SEQ ID NO: 5524 - protein, 10 aa, Homo sapiens
ILALLPALGL

SEQ ID NO: 5525 - protein, 10 aa, Homo sapiens
QVSNEDCLQV

SEQ ID NO: 5526 - protein, 10 aa, Homo sapiens
QLGEQCWTAR

SEQ ID NO: 5527 - protein, 10 aa, Homo sapiens
ALQPAAAILA

SEQ ID NO: 5528 - protein, 10 aa, Homo sapiens
AILALLPALG

SEQ ID NO: 5529 - protein, 10 aa, Homo sapiens
AVLLALLMAG

SEQ ID NO: 5530 - protein, 10 aa, Homo sapiens
ALLMAGLALQ

SEQ ID NO: 5531 - protein, 10 aa, Homo sapiens
GLLLWGPGQL

SEQ ID NO: 5532 - protein, 10 aa, Homo sapiens
VLLALLMAGL

SEQ ID NO: 5533 - protein, 10 aa, Homo sapiens
GLALQPGTAL

SEQ ID NO: 5534 - protein, 10 aa, Homo sapiens
SLNCVDDSQD

SEQ ID NO: 5535 - protein, 10 aa, Homo sapiens
DLCNASGAHA

SEQ ID NO: 5536 - protein, 10 aa, Homo sapiens
LLALLMAGLA

SEQ ID NO: 5537 - protein, 10 aa, Homo sapiens
ALLCYSCKAQ

SEQ ID NO: 5538 - protein, 10 aa, Homo sapiens
LLCYSCKAQV

SEQ ID NO: 5539 - protein, 10 aa, Homo sapiens
QVENCTQLGE

SEQ ID NO: 5540 - protein, 10 aa, Homo sapiens
TVISKGCSLN

SEQ ID NO: 5541 - protein, 10 aa, Homo sapiens
GTALLCYSCK

SEQ ID NO: 5542 - protein, 10 aa, Homo sapiens
ARIRAVGLLT

SEQ ID NO: 5543 - protein, 10 aa, Homo sapiens
LLPALGLLLW

SEQ ID NO: 5544 - protein, 10 aa, Homo sapiens
ALGLLLWGPG

SEQ ID NO: 5545 - protein, 10 aa, Homo sapiens
CLQVENCTQL

SEQ ID NO: 5546 - protein, 10 aa, Homo sapiens
DDSQDYYVGK

SEQ ID NO: 5547 - protein, 10 aa, Homo sapiens
AGLALQPGTA

SEQ ID NO: 5548 - protein, 10 aa, Homo sapiens
GLLTVISKGC

SEQ ID NO: 5549 - protein, 10 aa, Homo sapiens
DSQDYYVGKK

SEQ ID NO: 5550 - protein, 10 aa, Homo sapiens
AHALQPAAAI

SEQ ID NO: 5551 - protein, 10 aa, Homo sapiens
PLQPTLGVVP

SEQ ID NO: 5552 - protein, 10 aa, Homo sapiens
AVTPTCATPA

SEQ ID NO: 5553 - protein, 10 aa, Homo sapiens
RLPPSLRCSL

SEQ ID NO: 5554 - protein, 10 aa, Homo sapiens
ALSRTPTRQI

SEQ ID NO: 5555 - protein, 10 aa, Homo sapiens
SLRCSLHSAC

SEQ ID NO: 5556 - protein, 10 aa, Homo sapiens
TLNPVLRHLF

SEQ ID NO: 5557 - protein, 10 aa, Homo sapiens
PVLRHLFPQE

SEQ ID NO: 5558 - protein, 10 aa, Homo sapiens
PIYDLSQVWS

SEQ ID NO: 5559 - protein, 10 aa, Homo sapiens
DLSQVWSVVS

SEQ ID NO: 5560 - protein, 10 aa, Homo sapiens
ARRTSRAVTP

SEQ ID NO: 5561 - protein, 10 aa, Homo sapiens
GVVPQASVPL

SEQ ID NO: 5562 - protein, 10 aa, Homo sapiens
ASYRLWGAPL

SEQ ID NO: 5563 - protein, 10 aa, Homo sapiens
RLWGAPLQPT

SEQ ID NO: 5564 - protein, 10 aa, Homo sapiens
PLLTHPAQWE

SEQ ID NO: 5565 - protein, 10 aa, Homo sapiens
HLFPQEAFPA

SEQ ID NO: 5566 - protein, 10 aa, Homo sapiens
APSRGQALRR

SEQ ID NO: 5567 - protein, 10 aa, Homo sapiens
ACCSGDPASY

SEQ ID NO: 5568 - protein, 10 aa, Homo sapiens
TLGVVPQASV

SEQ ID NO: 5569 - protein, 10 aa, Homo sapiens
PVLVPEAHPN

SEQ ID NO: 5570 - protein, 10 aa, Homo sapiens
HPDPPMALSR

SEQ ID NO: 5571 - protein, 10 aa, Homo sapiens
SVVSPAPSRG

SEQ ID NO: 5572 - protein, 10 aa, Homo sapiens
WARRTSRAVT

SEQ ID NO: 5573 - protein, 10 aa, Homo sapiens
SLHSACCSGD

SEQ ID NO: 5574 - protein, 10 aa, Homo sapiens
SLTMYVCAPV

SEQ ID NO: 5575 - protein, 10 aa, Homo sapiens
VLRHLFPQEA

SEQ ID NO: 5576 - protein, 10 aa, Homo sapiens
SVPLLTHPAQ

SEQ ID NO: 5577 - protein, 10 aa, Homo sapiens
VLVPEAHPNA

SEQ ID NO: 5578 - protein, 10 aa, Homo sapiens
LVPEAHPNAS

SEQ ID NO: 5579 - protein, 10 aa, Homo sapiens
TMYVCAPVPH

SEQ ID NO: 5580 - protein, 10 aa, Homo sapiens
YVCAPVPHPD

SEQ ID NO: 5581 - protein, 10 aa, Homo sapiens
SIDTDPPADG

SEQ ID NO: 5582 - protein, 10 aa, Homo sapiens
QVWSVVSPAP

SEQ ID NO: 5583 - protein, 10 aa, Homo sapiens
VVSPAPSRGQ

SEQ ID NO: 5584 - protein, 10 aa, Homo sapiens
CCSGDPASYR

SEQ ID NO: 5585 - protein, 10 aa, Homo sapiens
PQASVPLLTH

SEQ ID NO: 5586 - protein, 10 aa, Homo sapiens
AHPNASLTMY

SEQ ID NO: 5587 - protein, 10 aa, Homo sapiens
PVPHPDPPMA

SEQ ID NO: 5588 - protein, 10 aa, Homo sapiens
AFSTLNPVLR

SEQ ID NO: 5589 - protein, 10 aa, Homo sapiens
RTSRAVTPTC

SEQ ID NO: 5590 - protein, 10 aa, Homo sapiens
RAVTPTCATP

SEQ ID NO: 5591 - protein, 10 aa, Homo sapiens
PCSRLPPSLR

SEQ ID NO: 5592 - protein, 10 aa, Homo sapiens
PLCCCFHGPA

SEQ ID NO: 5593 - protein, 10 aa, Homo sapiens
RLLPSLRCSL

SEQ ID NO: 5594 - protein, 10 aa, Homo sapiens
LLPSLRCSLH

SEQ ID NO: 5595 - protein, 10 aa, Homo sapiens
PCSRLLPSLR

SEQ ID NO: 5596 - protein, 10 aa, Homo sapiens
CCSGDPASSR

SEQ ID NO: 5597 - protein, 10 aa, Homo sapiens
ASSRLWGAPL

SEQ ID NO: 5598 - protein, 10 aa, Homo sapiens
SRLWGAPLQP

SEQ ID NO: 5599 - protein, 10 aa, Homo sapiens
ACCSGDPASS

SEQ ID NO: 5600 - protein, 10 aa, Homo sapiens
SSRLWGAPLQ

SEQ ID NO: 5601 - protein, 10 aa, Homo sapiens
GDPASSRLWG

SEQ ID NO: 5602 - protein, 10 aa, Homo sapiens
PLLTDPAQWE

SEQ ID NO: 5603 - protein, 10 aa, Homo sapiens
SVPLLTDPAQ

SEQ ID NO: 5604 - protein, 10 aa, Homo sapiens
LLTDPAQWEP

SEQ ID NO: 5605 - protein, 10 aa, Homo sapiens
VPLLTDPAQW

SEQ ID NO: 5606 - protein, 10 aa, Homo sapiens
PQASVPLLTD

SEQ ID NO: 5607 - protein, 10 aa, Homo sapiens
SVPLLTDLAQ

SEQ ID NO: 5608 - protein, 10 aa, Homo sapiens
PLLTDLAQWE

SEQ ID NO: 5609 - protein, 10 aa, Homo sapiens
DLAQWEPVLV

SEQ ID NO: 5610 - protein, 10 aa, Homo sapiens
LLTDLAQWEP

SEQ ID NO: 5611 - protein, 10 aa, Homo sapiens
VPLLTDLAQW

SEQ ID NO: 5612 - protein, 10 aa, Homo sapiens
TDLAQWEPVL

SEQ ID NO: 5613 - protein, 10 aa, Homo sapiens
SVPLLTHLAQ

SEQ ID NO: 5614 - protein, 10 aa, Homo sapiens
PLLTHLAQWE

SEQ ID NO: 5615 - protein, 10 aa, Homo sapiens
HLAQWEPVLV

SEQ ID NO: 5616 - protein, 10 aa, Homo sapiens
LLTHLAQWEP

SEQ ID NO: 5617 - protein, 10 aa, Homo sapiens
VPLLTHLAQW

SEQ ID NO: 5618 - protein, 10 aa, Homo sapiens
THLAQWEPVL

SEQ ID NO: 5619 - protein, 10 aa, Homo sapiens
LAQWEPVLVP

SEQ ID NO: 5620 - protein, 10 aa, Homo sapiens
TMYVCTPVPH

SEQ ID NO: 5621 - protein, 10 aa, Homo sapiens
SLTMYVCTPV

SEQ ID NO: 5622 - protein, 10 aa, Homo sapiens
YVCTPVPHPD

SEQ ID NO: 5623 - protein, 10 aa, Homo sapiens
ASLTMYVCTP

SEQ ID NO: 5624 - protein, 10 aa, Homo sapiens
QISSIDTDPP

SEQ ID NO: 5625 - protein, 10 aa, Homo sapiens
RTPTRQISSI

SEQ ID NO: 5626 - protein, 10 aa, Homo sapiens
RQISSIDTDP

SEQ ID NO: 5627 - protein, 10 aa, Homo sapiens
SSIDTDPPAD

SEQ ID NO: 5628 - protein, 10 aa, Homo sapiens
SRTPTRQISS

SEQ ID NO: 5629 - protein, 10 aa, Homo sapiens
TPTRQISSID

SEQ ID NO: 5630 - protein, 10 aa, Homo sapiens
TRQISSIDTD

SEQ ID NO: 5631 - protein, 10 aa, Homo sapiens
LSRTPTRQIS

SEQ ID NO: 5632 - protein, 10 aa, Homo sapiens
ISSSDTDPPA

SEQ ID NO: 5633 - protein, 10 aa, Homo sapiens
SSSDTDPPAD

SEQ ID NO: 5634 - protein, 10 aa, Homo sapiens
TPTRQIGSSD

SEQ ID NO: 5635 - protein, 10 aa, Homo sapiens
RQIGSSDTDP

SEQ ID NO: 5636 - protein, 10 aa, Homo sapiens
QIGSSDTDPP

SEQ ID NO: 5637 - protein, 10 aa, Homo sapiens
RTPTRQIGSS

SEQ ID NO: 5638 - protein, 10 aa, Homo sapiens
PTRQIGSSDT

SEQ ID NO: 5639 - protein, 10 aa, Homo sapiens
TRQIGSSDTD

SEQ ID NO: 5640 - protein, 10 aa, Homo sapiens
SSDTDPPADG

SEQ ID NO: 5641 - protein, 10 aa, Homo sapiens
SDTDPPADGP

SEQ ID NO: 5642 - protein, 10 aa, Homo sapiens
PSRGQALRRA

SEQ ID NO: 5643 - protein, 10 aa, Homo sapiens
SRGQALRRAQ

SEQ ID NO: 5644 - protein, 10 aa, Homo sapiens
LTVISKGCSL

SEQ ID NO: 5645 - protein, 10 aa, Homo sapiens
TVISKGCSLN

SEQ ID NO: 5646 - protein, 10 aa, Homo sapiens
DTDLCNASGA

SEQ ID NO: 5647 - protein, 10 aa, Homo sapiens
AAILALLPAL

SEQ ID NO: 5648 - protein, 10 aa, Homo sapiens
WTARIRAVGL

SEQ ID NO: 5649 - protein, 10 aa, Homo sapiens
AVGLLTVISK

SEQ ID NO: 5650 - protein, 10 aa, Homo sapiens
AVLLALLMAG

SEQ ID NO: 5651 - protein, 10 aa, Homo sapiens
LQPGTALLCY

SEQ ID NO: 5652 - protein, 10 aa, Homo sapiens
NCVDDSQDYY

SEQ ID NO: 5653 - protein, 10 aa, Homo sapiens
DSQDYYVGKK

SEQ ID NO: 5654 - protein, 10 aa, Homo sapiens
TARIRAVGLL

SEQ ID NO: 5655 - protein, 10 aa, Homo sapiens
YVGKKNITCC

SEQ ID NO: 5656 - protein, 10 aa, Homo sapiens
LQPAAAILAL

SEQ ID NO: 5657 - protein, 10 aa, Homo sapiens
LALLPALGLL

SEQ ID NO: 5658 - protein, 10 aa, Homo sapiens
QVSNEDCLQV

SEQ ID NO: 5659 - protein, 10 aa, Homo sapiens
ENCTQLGEQC

SEQ ID NO: 5660 - protein, 10 aa, Homo sapiens
KNITCCDTDL

SEQ ID NO: 5661 - protein, 10 aa, Homo sapiens
QPAAAILALL

SEQ ID NO: 5662 - protein, 10 aa, Homo sapiens
LALLMAGLAL

SEQ ID NO: 5663 - protein, 10 aa, Homo sapiens
QVENCTQLGE

SEQ ID NO: 5664 - protein, 10 aa, Homo sapiens
EQCWTARIRA

SEQ ID NO: 5665 - protein, 10 aa, Homo sapiens
CVDDSQDYYV

SEQ ID NO: 5666 - protein, 10 aa, Homo sapiens
ALLPALGLLL

SEQ ID NO: 5667 - protein, 10 aa, Homo sapiens
KAVLLALLMA

SEQ ID NO: 5668 - protein, 10 aa, Homo sapiens
GLALQPGTAL

SEQ ID NO: 5669 - protein, 10 aa, Homo sapiens
EDCLQVENCT

SEQ ID NO: 5670 - protein, 10 aa, Homo sapiens
RIRAVGLLTV

SEQ ID NO: 5671 - protein, 10 aa, Homo sapiens
LNCVDDSQDY

SEQ ID NO: 5672 - protein, 10 aa, Homo sapiens
GLLLWGPGQL

SEQ ID NO: 5673 - protein, 10 aa, Homo sapiens
GVVPQASVPL

SEQ ID NO: 5674 - protein, 10 aa, Homo sapiens
VVPQASVPLL

SEQ ID NO: 5675 - protein, 10 aa, Homo sapiens
STLNPVLRHL

SEQ ID NO: 5676 - protein, 10 aa, Homo sapiens
DTDPPADGPS

SEQ ID NO: 5677 - protein, 10 aa, Homo sapiens
SVVSPAPSRG

SEQ ID NO: 5678 - protein, 10 aa, Homo sapiens
EAFPAHPIYD

SEQ ID NO: 5679 - protein, 10 aa, Homo sapiens
AHPNASLTMY

SEQ ID NO: 5680 - protein, 10 aa, Homo sapiens
EPVLVPEAHP

SEQ ID NO: 5681 - protein, 10 aa, Homo sapiens
RTPTRQIGSI

SEQ ID NO: 5682 - protein, 10 aa, Homo sapiens
DPASYRLWGA

SEQ ID NO: 5683 - protein, 10 aa, Homo sapiens
LVPEAHPNAS

SEQ ID NO: 5684 - protein, 10 aa, Homo sapiens
EAHPNASLTM

SEQ ID NO: 5685 - protein, 10 aa, Homo sapiens
DGPSNPLCCC

SEQ ID NO: 5686 - protein, 10 aa, Homo sapiens
PAFSTLNPVL

SEQ ID NO: 5687 - protein, 10 aa, Homo sapiens
AVTPTCATPA

SEQ ID NO: 5688 - protein, 10 aa, Homo sapiens
ACCSGDPASY

SEQ ID NO: 5689 - protein, 10 aa, Homo sapiens
SVPLLTHPAQ

SEQ ID NO: 5690 - protein, 10 aa, Homo sapiens
AFPAHPIYDL

SEQ ID NO: 5691 - protein, 10 aa, Homo sapiens
QVWSVVSPAP

SEQ ID NO: 5692 - protein, 10 aa, Homo sapiens
SPAPSRGQAL

SEQ ID NO: 5693 - protein, 10 aa, Homo sapiens
TTTWARRTSR

SEQ ID NO: 5694 - protein, 10 aa, Homo sapiens
PVPHPDPPMA

SEQ ID NO: 5695 - protein, 10 aa, Homo sapiens
PVLRHLFPQE

SEQ ID NO: 5696 - protein, 10 aa, Homo sapiens
VVSPAPSRGQ

SEQ ID NO: 5697 - protein, 10 aa, Homo sapiens
MPCSRLLPSL

SEQ ID NO: 5698 - protein, 10 aa, Homo sapiens
RLLPSLRCSL

SEQ ID NO: 5699 - protein, 10 aa, Homo sapiens
AGPMPCSRLL

SEQ ID NO: 5700 - protein, 10 aa, Homo sapiens
DPASSRLWGA

SEQ ID NO: 5701 - protein, 10 aa, Homo sapiens
CSGDPASSRL

SEQ ID NO: 5702 - protein, 10 aa, Homo sapiens
ASSRLWGAPL

SEQ ID NO: 5703 - protein, 10 aa, Homo sapiens
SVPLLTDPAQ

SEQ ID NO: 5704 - protein, 10 aa, Homo sapiens
LTDPAQWEPV

SEQ ID NO: 5705 - protein, 10 aa, Homo sapiens
TDPAQWEPVL

SEQ ID NO: 5706 - protein, 10 aa, Homo sapiens
DPAQWEPVLV

SEQ ID NO: 5707 - protein, 10 aa, Homo sapiens
PQASVPLLTD

SEQ ID NO: 5708 - protein, 10 aa, Homo sapiens
ASVPLLTDPA

SEQ ID NO: 5709 - protein, 10 aa, Homo sapiens
SVPLLTDLAQ

SEQ ID NO: 5710 - protein, 10 aa, Homo sapiens
QASVPLLTDL

SEQ ID NO: 5711 - protein, 10 aa, Homo sapiens
TDLAQWEPVL

SEQ ID NO: 5712 - protein, 10 aa, Homo sapiens
LTDLAQWEPV

SEQ ID NO: 5713 - protein, 10 aa, Homo sapiens
DLAQWEPVLV

SEQ ID NO: 5714 - protein, 10 aa, Homo sapiens
SVPLLTHLAQ

SEQ ID NO: 5715 - protein, 10 aa, Homo sapiens
QASVPLLTHL

SEQ ID NO: 5716 - protein, 10 aa, Homo sapiens
THLAQWEPVL

SEQ ID NO: 5717 - protein, 10 aa, Homo sapiens
LTHLAQWEPV

SEQ ID NO: 5718 - protein, 10 aa, Homo sapiens
YVCTPVPHPD

SEQ ID NO: 5719 - protein, 10 aa, Homo sapiens
LTMYVCTPVP

SEQ ID NO: 5720 - protein, 10 aa, Homo sapiens
MYVCTPVPHP

SEQ ID NO: 5721 - protein, 10 aa, Homo sapiens
CTPVPHPDPP

SEQ ID NO: 5722 - protein, 10 aa, Homo sapiens
TPVPHPDPPM

SEQ ID NO: 5723 - protein, 10 aa, Homo sapiens
ASLTMYVCTP

SEQ ID NO: 5724 - protein, 10 aa, Homo sapiens
RTPTRQISSI

SEQ ID NO: 5725 - protein, 10 aa, Homo sapiens
PTRQISSIDT

SEQ ID NO: 5726 - protein, 10 aa, Homo sapiens
SSIDTDPPAD

SEQ ID NO: 5727 - protein, 10 aa, Homo sapiens
TRQISSIDTD

SEQ ID NO: 5728 - protein, 10 aa, Homo sapiens
RTPTRQISSS

SEQ ID NO: 5729 - protein, 10 aa, Homo sapiens
PTRQISSSDT

SEQ ID NO: 5730 - protein, 10 aa, Homo sapiens
RTPTRQIGSS

SEQ ID NO: 5731 - protein, 10 aa, Homo sapiens
PTRQIGSSDT

SEQ ID NO: 5732 - protein, 10 aa, Homo sapiens
PSRGQALRRA

SEQ ID NO: 5733 - protein, 10 aa, Homo sapiens
SRGQALRRAQ

SEQ ID NO: 5734 - protein, 10 aa, Homo sapiens
QPAAAILALL

SEQ ID NO: 5735 - protein, 10 aa, Homo sapiens
ALLPALGLLL

SEQ ID NO: 5736 - protein, 10 aa, Homo sapiens
LQPAAAILAL

SEQ ID NO: 5737 - protein, 10 aa, Homo sapiens
AAILALLPAL

SEQ ID NO: 5738 - protein, 10 aa, Homo sapiens
ILALLPALGL

SEQ ID NO: 5739 - protein, 10 aa, Homo sapiens
LALLMAGLAL

SEQ ID NO: 5740 - protein, 10 aa, Homo sapiens
GLALQPGTAL

SEQ ID NO: 5741 - protein, 10 aa, Homo sapiens
WTARIRAVGL

SEQ ID NO: 5742 - protein, 10 aa, Homo sapiens
TARIRAVGLL

SEQ ID NO: 5743 - protein, 10 aa, Homo sapiens
LPALGLLLWG

SEQ ID NO: 5744 - protein, 10 aa, Homo sapiens
VLLALLMAGL

SEQ ID NO: 5745 - protein, 10 aa, Homo sapiens
LALQPGTALL

SEQ ID NO: 5746 - protein, 10 aa, Homo sapiens
RIRAVGLLTV

SEQ ID NO: 5747 - protein, 10 aa, Homo sapiens
KNITCCDTDL

SEQ ID NO: 5748 - protein, 10 aa, Homo sapiens
LCNASGAHAL

SEQ ID NO: 5749 - protein, 10 aa, Homo sapiens
AAAILALLPA

SEQ ID NO: 5750 - protein, 10 aa, Homo sapiens
QPGTALLCYS

SEQ ID NO: 5751 - protein, 10 aa, Homo sapiens
KAQVSNEDCL

SEQ ID NO: 5752 - protein, 10 aa, Homo sapiens
CLQVENCTQL

SEQ ID NO: 5753 - protein, 10 aa, Homo sapiens
ASGAHALQPA

SEQ ID NO: 5754 - protein, 10 aa, Homo sapiens
AHALQPAAAI

SEQ ID NO: 5755 - protein, 10 aa, Homo sapiens
HALQPAAAIL

SEQ ID NO: 5756 - protein, 10 aa, Homo sapiens
SPAPSRGQAL

SEQ ID NO: 5757 - protein, 10 aa, Homo sapiens
VPEAHPNASL

SEQ ID NO: 5758 - protein, 10 aa, Homo sapiens
VPHPDPPMAL

SEQ ID NO: 5759 - protein, 10 aa, Homo sapiens
PPADGPSNPL

SEQ ID NO: 5760 - protein, 10 aa, Homo sapiens
MPCSRLPPSL

SEQ ID NO: 5761 - protein, 10 aa, Homo sapiens
APVPHPDPPM

SEQ ID NO: 5762 - protein, 10 aa, Homo sapiens
PPMALSRTPT

SEQ ID NO: 5763 - protein, 10 aa, Homo sapiens
APLQPTLGVV

SEQ ID NO: 5764 - protein, 10 aa, Homo sapiens
VPQASVPLLT

SEQ ID NO: 5765 - protein, 10 aa, Homo sapiens
HPAQWEPVLV

SEQ ID NO: 5766 - protein, 10 aa, Homo sapiens
QPTLGVVPQA

SEQ ID NO: 5767 - protein, 10 aa, Homo sapiens
HPNASLTMYV

SEQ ID NO: 5768 - protein, 10 aa, Homo sapiens
GPSNPLCCCF

SEQ ID NO: 5769 - protein, 10 aa, Homo sapiens
GPAFSTLNPV

SEQ ID NO: 5770 - protein, 10 aa, Homo sapiens
DPASYRLWGA

SEQ ID NO: 5771 - protein, 10 aa, Homo sapiens
GPMPCSRLPP

SEQ ID NO: 5772 - protein, 10 aa, Homo sapiens
APSRGQALRR

SEQ ID NO: 5773 - protein, 10 aa, Homo sapiens
PPSLRCSLHS

SEQ ID NO: 5774 - protein, 10 aa, Homo sapiens
ASYRLWGAPL

SEQ ID NO: 5775 - protein, 10 aa, Homo sapiens
GVVPQASVPL

SEQ ID NO: 5776 - protein, 10 aa, Homo sapiens
HPDPPMALSR

SEQ ID NO: 5777 - protein, 10 aa, Homo sapiens
TPAGPMPCSR

SEQ ID NO: 5778 - protein, 10 aa, Homo sapiens
RLPPSLRCSL

SEQ ID NO: 5779 - protein, 10 aa, Homo sapiens
LWGAPLQPTL

SEQ ID NO: 5780 - protein, 10 aa, Homo sapiens
THPAQWEPVL

SEQ ID NO: 5781 - protein, 10 aa, Homo sapiens
CFHGPAFSTL

SEQ ID NO: 5782 - protein, 10 aa, Homo sapiens
AFPAHPIYDL

SEQ ID NO: 5783 - protein, 10 aa, Homo sapiens
PAGPMPCSRL

SEQ ID NO: 5784 - protein, 10 aa, Homo sapiens
VVPQASVPLL

SEQ ID NO: 5785 - protein, 10 aa, Homo sapiens
EPVLVPEAHP

SEQ ID NO: 5786 - protein, 10 aa, Homo sapiens
PAFSTLNPVL

SEQ ID NO: 5787 - protein, 10 aa, Homo sapiens
WARRTSRAVT

SEQ ID NO: 5788 - protein, 10 aa, Homo sapiens
AVTPTCATPA

SEQ ID NO: 5789 - protein, 10 aa, Homo sapiens
TPTCATPAGP

SEQ ID NO: 5790 - protein, 10 aa, Homo sapiens
CSGDPASYRL

SEQ ID NO: 5791 - protein, 10 aa, Homo sapiens
ASVPLLTHPA

SEQ ID NO: 5792 - protein, 10 aa, Homo sapiens
VPLLTHPAQW

SEQ ID NO: 5793 - protein, 10 aa, Homo sapiens
ALSRTPTRQI

SEQ ID NO: 5794 - protein, 10 aa, Homo sapiens
IGSIDTDPPA

SEQ ID NO: 5795 - protein, 10 aa, Homo sapiens
DPPADGPSNP

SEQ ID NO: 5796 - protein, 10 aa, Homo sapiens
NPLCCCFHGP

SEQ ID NO: 5797 - protein, 10 aa, Homo sapiens
NPVLRHLFPQ

SEQ ID NO: 5798 - protein, 10 aa, Homo sapiens
FPQEAFPAHP

SEQ ID NO: 5799 - protein, 10 aa, Homo sapiens
FPAHPIYDLS

SEQ ID NO: 5800 - protein, 10 aa, Homo sapiens
HPIYDLSQVW

SEQ ID NO: 5801 - protein, 10 aa, Homo sapiens
MPCSRLLPSL

SEQ ID NO: 5802 - protein, 10 aa, Homo sapiens
GPMPCSRLLP

SEQ ID NO: 5803 - protein, 10 aa, Homo sapiens
LPSLRCSLHS

SEQ ID NO: 5804 - protein, 10 aa, Homo sapiens
RLLPSLRCSL

SEQ ID NO: 5805 - protein, 10 aa, Homo sapiens
AGPMPCSRLL

SEQ ID NO: 5806 - protein, 10 aa, Homo sapiens
DPASSRLWGA

SEQ ID NO: 5807 - protein, 10 aa, Homo sapiens
ASSRLWGAPL

SEQ ID NO: 5808 - protein, 10 aa, Homo sapiens
CSGDPASSRL

SEQ ID NO: 5809 - protein, 10 aa, Homo sapiens
DPAQWEPVLV

SEQ ID NO: 5810 - protein, 10 aa, Homo sapiens
TDPAQWEPVL

SEQ ID NO: 5811 - protein, 10 aa, Homo sapiens
ASVPLLTDPA

SEQ ID NO: 5812 - protein, 10 aa, Homo sapiens
VPLLTDPAQW

SEQ ID NO: 5813 - protein, 10 aa, Homo sapiens
LTDPAQWEPV

SEQ ID NO: 5814 - protein, 10 aa, Homo sapiens
QASVPLLTDL

SEQ ID NO: 5815 - protein, 10 aa, Homo sapiens
TDLAQWEPVL

SEQ ID NO: 5816 - protein, 10 aa, Homo sapiens
VPLLTDLAQW

SEQ ID NO: 5817 - protein, 10 aa, Homo sapiens
ASVPLLTDLA

SEQ ID NO: 5818 - protein, 10 aa, Homo sapiens
DLAQWEPVLV

SEQ ID NO: 5819 - protein, 10 aa, Homo sapiens
LTDLAQWEPV

SEQ ID NO: 5820 - protein, 10 aa, Homo sapiens
QASVPLLTHL

SEQ ID NO: 5821 - protein, 10 aa, Homo sapiens
THLAQWEPVL

SEQ ID NO: 5822 - protein, 10 aa, Homo sapiens
VPLLTHLAQW

SEQ ID NO: 5823 - protein, 10 aa, Homo sapiens
ASVPLLTHLA

SEQ ID NO: 5824 - protein, 10 aa, Homo sapiens
HLAQWEPVLV

SEQ ID NO: 5825 - protein, 10 aa, Homo sapiens
TPVPHPDPPM

SEQ ID NO: 5826 - protein, 10 aa, Homo sapiens
NASLTMYVCT

SEQ ID NO: 5827 - protein, 10 aa, Homo sapiens
ISSIDTDPPA

SEQ ID NO: 5828 - protein, 10 aa, Homo sapiens
TPTRQISSID

SEQ ID NO: 5829 - protein, 10 aa, Homo sapiens
PTRQISSIDT

SEQ ID NO: 5830 - protein, 10 aa, Homo sapiens
RTPTRQISSI

SEQ ID NO: 5831 - protein, 10 aa, Homo sapiens
ISSSDTDPPA

SEQ ID NO: 5832 - protein, 10 aa, Homo sapiens
TPTRQISSSD

SEQ ID NO: 5833 - protein, 10 aa, Homo sapiens
PTRQISSSDT

SEQ ID NO: 5834 - protein, 10 aa, Homo sapiens
IGSSDTDPPA

SEQ ID NO: 5835 - protein, 10 aa, Homo sapiens
TPTRQIGSSD

SEQ ID NO: 5836 - protein, 10 aa, Homo sapiens
PTRQIGSSDT

SEQ ID NO: 5837 - protein, 10 aa, Homo sapiens
PSRGQALRRA

SEQ ID NO: 5838 - protein, 10 aa, Homo sapiens
AAILALLPAL

SEQ ID NO: 5839 - protein, 10 aa, Homo sapiens
ALLPALGLLL

SEQ ID NO: 5840 - protein, 10 aa, Homo sapiens
LQPAAAILAL

SEQ ID NO: 5841 - protein, 10 aa, Homo sapiens
LALLMAGLAL

SEQ ID NO: 5842 - protein, 10 aa, Homo sapiens
KNITCCDTDL

SEQ ID NO: 5843 - protein, 10 aa, Homo sapiens
AHALQPAAAI

SEQ ID NO: 5844 - protein, 10 aa, Homo sapiens
LQPGTALLCY

SEQ ID NO: 5845 - protein, 10 aa, Homo sapiens
LCNASGAHAL

SEQ ID NO: 5846 - protein, 10 aa, Homo sapiens
LALLPALGLL

SEQ ID NO: 5847 - protein, 10 aa, Homo sapiens
LLPALGLLLW

SEQ ID NO: 5848 - protein, 10 aa, Homo sapiens
GLLLWGPGQL

SEQ ID NO: 5849 - protein, 10 aa, Homo sapiens
GLALQPGTAL

SEQ ID NO: 5850 - protein, 10 aa, Homo sapiens
LALQPGTALL

SEQ ID NO: 5851 - protein, 10 aa, Homo sapiens
NEDCLQVENC

SEQ ID NO: 5852 - protein, 10 aa, Homo sapiens
WTARIRAVGL

SEQ ID NO: 5853 - protein, 10 aa, Homo sapiens
ILALLPALGL

SEQ ID NO: 5854 - protein, 10 aa, Homo sapiens
GEQCWTARIR

SEQ ID NO: 5855 - protein, 10 aa, Homo sapiens
TARIRAVGLL

SEQ ID NO: 5856 - protein, 10 aa, Homo sapiens
NCVDDSQDYY

SEQ ID NO: 5857 - protein, 10 aa, Homo sapiens
HALQPAAAIL

SEQ ID NO: 5858 - protein, 10 aa, Homo sapiens
QPAAAILALL

SEQ ID NO: 5859 - protein, 10 aa, Homo sapiens
VLLALLMAGL

SEQ ID NO: 5860 - protein, 10 aa, Homo sapiens
KAQVSNEDCL

SEQ ID NO: 5861 - protein, 10 aa, Homo sapiens
CLQVENCTQL

SEQ ID NO: 5862 - protein, 10 aa, Homo sapiens
VENCTQLGEQ

SEQ ID NO: 5863 - protein, 10 aa, Homo sapiens
NCTQLGEQCW

SEQ ID NO: 5864 - protein, 10 aa, Homo sapiens
IRAVGLLTVI

SEQ ID NO: 5865 - protein, 10 aa, Homo sapiens
LTVISKGCSL

SEQ ID NO: 5866 - protein, 10 aa, Homo sapiens
LNCVDDSQDY

SEQ ID NO: 5867 - protein, 10 aa, Homo sapiens
QDYYVGKKNI

SEQ ID NO: 5868 - protein, 10 aa, Homo sapiens
ALQPGTALLC

SEQ ID NO: 5869 - protein, 10 aa, Homo sapiens
LGEQCWTARI

SEQ ID NO: 5870 - protein, 10 aa, Homo sapiens
ARIRAVGLLT

SEQ ID NO: 5871 - protein, 10 aa, Homo sapiens
ALQPAAAILA

SEQ ID NO: 5872 - protein, 10 aa, Homo sapiens
QEAFPAHPIY

SEQ ID NO: 5873 - protein, 10 aa, Homo sapiens
SGDPASYRLW

SEQ ID NO: 5874 - protein, 10 aa, Homo sapiens
AFPAHPIYDL

SEQ ID NO: 5875 - protein, 10 aa, Homo sapiens
AHPNASLTMY

SEQ ID NO: 5876 - protein, 10 aa, Homo sapiens
VPHPDPPMAL

SEQ ID NO: 5877 - protein, 10 aa, Homo sapiens
ALSRTPTRQI

SEQ ID NO: 5878 - protein, 10 aa, Homo sapiens
TLNPVLRHLF

SEQ ID NO: 5879 - protein, 10 aa, Homo sapiens
SPAPSRGQAL

SEQ ID NO: 5880 - protein, 10 aa, Homo sapiens
RLPPSLRCSL

SEQ ID NO: 5881 - protein, 10 aa, Homo sapiens
STLNPVLRHL

SEQ ID NO: 5882 - protein, 10 aa, Homo sapiens
ACCSGDPASY

SEQ ID NO: 5883 - protein, 10 aa, Homo sapiens
ASYRLWGAPL

SEQ ID NO: 5884 - protein, 10 aa, Homo sapiens
GVVPQASVPL

SEQ ID NO: 5885 - protein, 10 aa, Homo sapiens
VPLLTHPAQW

SEQ ID NO: 5886 - protein, 10 aa, Homo sapiens
WEPVLVPEAH

SEQ ID NO: 5887 - protein, 10 aa, Homo sapiens
HPIYDLSQVW

SEQ ID NO: 5888 - protein, 10 aa, Homo sapiens
PAGPMPCSRL

SEQ ID NO: 5889 - protein, 10 aa, Homo sapiens
VVPQASVPLL

SEQ ID NO: 5890 - protein, 10 aa, Homo sapiens
RTPTRQIGSI

SEQ ID NO: 5891 - protein, 10 aa, Homo sapiens
CFHGPAFSTL

SEQ ID NO: 5892 - protein, 10 aa, Homo sapiens
PAFSTLNPVL

SEQ ID NO: 5893 - protein, 10 aa, Homo sapiens
LRHLFPQEAF

SEQ ID NO: 5894 - protein, 10 aa, Homo sapiens
THPAQWEPVL

SEQ ID NO: 5895 - protein, 10 aa, Homo sapiens
PEAHPNASLT

SEQ ID NO: 5896 - protein, 10 aa, Homo sapiens
PPADGPSNPL

SEQ ID NO: 5897 - protein, 10 aa, Homo sapiens
GPSNPLCCCF

SEQ ID NO: 5898 - protein, 10 aa, Homo sapiens
LCCCFHGPAF

SEQ ID NO: 5899 - protein, 10 aa, Homo sapiens
MPCSRLPPSL

SEQ ID NO: 5900 - protein, 10 aa, Homo sapiens
CSGDPASYRL

SEQ ID NO: 5901 - protein, 10 aa, Homo sapiens
LWGAPLQPTL

SEQ ID NO: 5902 - protein, 10 aa, Homo sapiens
VPEAHPNASL

SEQ ID NO: 5903 - protein, 10 aa, Homo sapiens
PQEAFPAHPI

SEQ ID NO: 5904 - protein, 10 aa, Homo sapiens
EAFPAHPIYD

SEQ ID NO: 5905 - protein, 10 aa, Homo sapiens
AGPMPCSRLL

SEQ ID NO: 5906 - protein, 10 aa, Homo sapiens
RLLPSLRCSL

SEQ ID NO: 5907 - protein, 10 aa, Homo sapiens
MPCSRLLPSL

SEQ ID NO: 5908 - protein, 10 aa, Homo sapiens
GPMPCSRLLP

SEQ ID NO: 5909 - protein, 10 aa, Homo sapiens
SGDPASSRLW

SEQ ID NO: 5910 - protein, 10 aa, Homo sapiens
ASSRLWGAPL

SEQ ID NO: 5911 - protein, 10 aa, Homo sapiens
CSGDPASSRL

SEQ ID NO: 5912 - protein, 10 aa, Homo sapiens
VPLLTDPAQW

SEQ ID NO: 5913 - protein, 10 aa, Homo sapiens
TDPAQWEPVL

SEQ ID NO: 5914 - protein, 10 aa, Homo sapiens
ASVPLLTDPA

SEQ ID NO: 5915 - protein, 10 aa, Homo sapiens
VPLLTDLAQW

SEQ ID NO: 5916 - protein, 10 aa, Homo sapiens
QASVPLLTDL

SEQ ID NO: 5917 - protein, 10 aa, Homo sapiens
TDLAQWEPVL

SEQ ID NO: 5918 - protein, 10 aa, Homo sapiens
ASVPLLTDLA

SEQ ID NO: 5919 - protein, 10 aa, Homo sapiens
SVPLLTDLAQ

SEQ ID NO: 5920 - protein, 10 aa, Homo sapiens
VPLLTHLAQW

SEQ ID NO: 5921 - protein, 10 aa, Homo sapiens
QASVPLLTHL

SEQ ID NO: 5922 - protein, 10 aa, Homo sapiens
THLAQWEPVL

SEQ ID NO: 5923 - protein, 10 aa, Homo sapiens
ASVPLLTHLA

SEQ ID NO: 5924 - protein, 10 aa, Homo sapiens
SVPLLTHLAQ

SEQ ID NO: 5925 - protein, 10 aa, Homo sapiens
ASLTMYVCTP

SEQ ID NO: 5926 - protein, 10 aa, Homo sapiens
NASLTMYVCT

SEQ ID NO: 5927 - protein, 10 aa, Homo sapiens
LTMYVCTPVP

SEQ ID NO: 5928 - protein, 10 aa, Homo sapiens
YVCTPVPHPD

SEQ ID NO: 5929 - protein, 10 aa, Homo sapiens
VCTPVPHPDP

SEQ ID NO: 5930 - protein, 10 aa, Homo sapiens
TPVPHPDPPM

SEQ ID NO: 5931 - protein, 10 aa, Homo sapiens
RTPTRQISSI

SEQ ID NO: 5932 - protein, 10 aa, Homo sapiens
SSIDTDPPAD

SEQ ID NO: 5933 - protein, 10 aa, Homo sapiens
SSSDTDPPAD

SEQ ID NO: 5934 - protein, 10 aa, Homo sapiens
RTPTRQISSS

SEQ ID NO: 5935 - protein, 10 aa, Homo sapiens
RQISSSDTDP

SEQ ID NO: 5936 - protein, 10 aa, Homo sapiens
QISSSDTDPP

SEQ ID NO: 5937 - protein, 10 aa, Homo sapiens
RTPTRQIGSS

SEQ ID NO: 5938 - protein, 10 aa, Homo sapiens
GSSDTDPPAD

SEQ ID NO: 5939 - protein, 10 aa, Homo sapiens
RQIGSSDTDP

SEQ ID NO: 5940 - protein, 10 aa, Homo sapiens
SSDTDPPADG

SEQ ID NO: 5941 - protein, 10 aa, Homo sapiens
SDTDPPADGP

SEQ ID NO: 5942 - protein, 10 aa, Homo sapiens
SRGQALRRAQ

SEQ ID NO: 5943 - protein, 10 aa, Homo sapiens
PSRGQALRRA

SEQ ID NO: 5944 - protein, 15 aa, Homo sapiens
AAILALLPALGLLLW

SEQ ID NO: 5945 - protein, 15 aa, Homo sapiens
AVLLALLMAGLALQP

SEQ ID NO: 5946 - protein, 15 aa, Homo sapiens
MAGLALQPGTALLCY

SEQ ID NO: 5947 - protein, 15 aa, Homo sapiens
KAVLLALLMAGLALQ

SEQ ID NO: 5948 - protein, 15 aa, Homo sapiens
TARIRAVGLLTVISK

SEQ ID NO: 5949 - protein, 15 aa, Homo sapiens
LALLMAGLALQPGTA

SEQ ID NO: 5950 - protein, 15 aa, Homo sapiens
QCWTARIRAVGLLTV

SEQ ID NO: 5951 - protein, 15 aa, Homo sapiens
DTDLCNASGAHALQP

SEQ ID NO: 5952 - protein, 15 aa, Homo sapiens
AHALQPAAAILALLP

SEQ ID NO: 5953 - protein, 15 aa, Homo sapiens
ILALLPALGLLLWGP

SEQ ID NO: 5954 - protein, 15 aa, Homo sapiens
VLLALLMAGLALQPG

SEQ ID NO: 5955 - protein, 15 aa, Homo sapiens
RIRAVGLLTVISKGC

SEQ ID NO: 5956 - protein, 15 aa, Homo sapiens
AVGLLTVISKGCSLN

SEQ ID NO: 5957 - protein, 15 aa, Homo sapiens
VGLLTVISKGCSLNC

SEQ ID NO: 5958 - protein, 15 aa, Homo sapiens
SGAHALQPAAAILAL

SEQ ID NO: 5959 - protein, 15 aa, Homo sapiens
LMAGLALQPGTALLC

SEQ ID NO: 5960 - protein, 15 aa, Homo sapiens
ASGAHALQPAAAILA

SEQ ID NO: 5961 - protein, 15 aa, Homo sapiens
LQPAAAILALLPALG

SEQ ID NO: 5962 - protein, 15 aa, Homo sapiens
AAAILALLPALGLLL

SEQ ID NO: 5963 - protein, 15 aa, Homo sapiens
GLLTVISKGCSLNCV

SEQ ID NO: 5964 - protein, 15 aa, Homo sapiens
CCDTDLCNASGAHAL

SEQ ID NO: 5965 - protein, 15 aa, Homo sapiens
QPAAAILALLPALGL

SEQ ID NO: 5966 - protein, 15 aa, Homo sapiens
TDLCNASGAHALQPA

SEQ ID NO: 5967 - protein, 15 aa, Homo sapiens
LLPALGLLLWGPGQL

SEQ ID NO: 5968 - protein, 15 aa, Homo sapiens
EDCLQVENCTQLGEQ

SEQ ID NO: 5969 - protein, 15 aa, Homo sapiens
IRAVGLLTVISKGCS

SEQ ID NO: 5970 - protein, 15 aa, Homo sapiens
LALLPALGLLLWGPG

SEQ ID NO: 5971 - protein, 15 aa, Homo sapiens
NPVLRHLFPQEAFPA

SEQ ID NO: 5972 - protein, 15 aa, Homo sapiens
LRHLFPQEAFPAHPI

SEQ ID NO: 5973 - protein, 15 aa, Homo sapiens
SQVWSVVSPAPSRGQ

SEQ ID NO: 5974 - protein, 15 aa, Homo sapiens
TLGVVPQASVPLLTH

SEQ ID NO: 5975 - protein, 15 aa, Homo sapiens
TRQIGSIDTDPPADG

SEQ ID NO: 5976 - protein, 15 aa, Homo sapiens
IYDLSQVWSVVSPAP

SEQ ID NO: 5977 - protein, 15 aa, Homo sapiens
LSQVWSVVSPAPSRG

SEQ ID NO: 5978 - protein, 15 aa, Homo sapiens
SRAVTPTCATPAGPM

SEQ ID NO: 5979 - protein, 15 aa, Homo sapiens
TTTWARRTSRAVTPT

SEQ ID NO: 5980 - protein, 15 aa, Homo sapiens
DPASYRLWGAPLQPT

SEQ ID NO: 5981 - protein, 15 aa, Homo sapiens
GAPLQPTLGVVPQAS

SEQ ID NO: 5982 - protein, 15 aa, Homo sapiens
PAQWEPVLVPEAHPN

SEQ ID NO: 5983 - protein, 15 aa, Homo sapiens
GPAFSTLNPVLRHLF

SEQ ID NO: 5984 - protein, 15 aa, Homo sapiens
AHPIYDLSQVWSVVS

SEQ ID NO: 5985 - protein, 15 aa, Homo sapiens
RRTSRAVTPTCATPA

SEQ ID NO: 5986 - protein, 15 aa, Homo sapiens
LWGAPLQPTLGVVPQ

SEQ ID NO: 5987 - protein, 15 aa, Homo sapiens
PQASVPLLTHPAQWE

SEQ ID NO: 5988 - protein, 15 aa, Homo sapiens
PMALSRTPTRQIGSI

SEQ ID NO: 5989 - protein, 15 aa, Homo sapiens
FSTLNPVLRHLFPQE

SEQ ID NO: 5990 - protein, 15 aa, Homo sapiens
PASYRLWGAPLQPTL

SEQ ID NO: 5991 - protein, 15 aa, Homo sapiens
QPTLGVVPQASVPLL

SEQ ID NO: 5992 - protein, 15 aa, Homo sapiens
PVLVPEAHPNASLTM

SEQ ID NO: 5993 - protein, 15 aa, Homo sapiens
ASLTMYVCAPVPHPD

SEQ ID NO: 5994 - protein, 15 aa, Homo sapiens
CAPVPHPDPPMALSR

SEQ ID NO: 5995 - protein, 15 aa, Homo sapiens
LQPTLGVVPQASVPL

SEQ ID NO: 5996 - protein, 15 aa, Homo sapiens
LTMYVCAPVPHPDPP

SEQ ID NO: 5997 - protein, 15 aa, Homo sapiens
GSIDTDPPADGPSNP

SEQ ID NO: 5998 - protein, 15 aa, Homo sapiens
HPIYDLSQVWSVVSP

SEQ ID NO: 5999 - protein, 15 aa, Homo sapiens
TWARRTSRAVTPTCA

SEQ ID NO: 6000 - protein, 15 aa, Homo sapiens
YRLWGAPLQPTLGVV

SEQ ID NO: 6001 - protein, 15 aa, Homo sapiens
NASLTMYVCAPVPHP

SEQ ID NO: 6002 - protein, 15 aa, Homo sapiens
CCCFHGPAFSTLNPV

SEQ ID NO: 6003 - protein, 15 aa, Homo sapiens
QEAFPAHPIYDLSQV

SEQ ID NO: 6004 - protein, 15 aa, Homo sapiens
AVTPTCATPAGPMPC

SEQ ID NO: 6005 - protein, 15 aa, Homo sapiens
SLRCSLHSACCSGDP

SEQ ID NO: 6006 - protein, 15 aa, Homo sapiens
PTLGVVPQASVPLLT

SEQ ID NO: 6007 - protein, 15 aa, Homo sapiens
QASVPLLTHPAQWEP

SEQ ID NO: 6008 - protein, 15 aa, Homo sapiens
VPLLTHPAQWEPVLV

SEQ ID NO: 6009 - protein, 15 aa, Homo sapiens
WEPVLVPEAHPNASL

SEQ ID NO: 6010 - protein, 15 aa, Homo sapiens
EPVLVPEAHPNASLT

SEQ ID NO: 6011 - protein, 15 aa, Homo sapiens
WSVVSPAPSRGQALR

SEQ ID NO: 6012 - protein, 15 aa, Homo sapiens
VTPTCATPAGPMPCS

SEQ ID NO: 6013 - protein, 15 aa, Homo sapiens
TPTCATPAGPMPCSR

SEQ ID NO: 6014 - protein, 15 aa, Homo sapiens
TPAGPMPCSRLPPSL

SEQ ID NO: 6015 - protein, 15 aa, Homo sapiens
AGPMPCSRLPPSLRC

SEQ ID NO: 6016 - protein, 15 aa, Homo sapiens
CSRLPPSLRCSLHSA

SEQ ID NO: 6017 - protein, 15 aa, Homo sapiens
SLHSACCSGDPASYR

SEQ ID NO: 6018 - protein, 15 aa, Homo sapiens
LGVVPQASVPLLTHP

SEQ ID NO: 6019 - protein, 15 aa, Homo sapiens
SVPLLTHPAQWEPVL

SEQ ID NO: 6020 - protein, 15 aa, Homo sapiens
QWEPVLVPEAHPNAS

SEQ ID NO: 6021 - protein, 15 aa, Homo sapiens
HPDPPMALSRTPTRQ

SEQ ID NO: 6022 - protein, 15 aa, Homo sapiens
SNPLCCCFHGPAFST

SEQ ID NO: 6023 - protein, 15 aa, Homo sapiens
NPLCCCFHGPAFSTL

SEQ ID NO: 6024 - protein, 15 aa, Homo sapiens
PLCCCFHGPAFSTLN

SEQ ID NO: 6025 - protein, 15 aa, Homo sapiens
STLNPVLRHLFPQEA

SEQ ID NO: 6026 - protein, 15 aa, Homo sapiens
LFPQEAFPAHPIYDL

SEQ ID NO: 6027 - protein, 15 aa, Homo sapiens
VVSPAPSRGQALRRA

SEQ ID NO: 6028 - protein, 15 aa, Homo sapiens
RLPPSLRCSLHSACC

SEQ ID NO: 6029 - protein, 15 aa, Homo sapiens
RLWGAPLQPTLGVVP

SEQ ID NO: 6030 - protein, 15 aa, Homo sapiens
LTHPAQWEPVLVPEA

SEQ ID NO: 6031 - protein, 15 aa, Homo sapiens
EAHPNASLTMYVCAP

SEQ ID NO: 6032 - protein, 15 aa, Homo sapiens
DPPMALSRTPTRQIG

SEQ ID NO: 6033 - protein, 15 aa, Homo sapiens
SRTPTRQIGSIDTDP

SEQ ID NO: 6034 - protein, 15 aa, Homo sapiens
RTPTRQIGSIDTDPP

SEQ ID NO: 6035 - protein, 15 aa, Homo sapiens
DTDPPADGPSNPLCC

SEQ ID NO: 6036 - protein, 15 aa, Homo sapiens
VWSVVSPAPSRGQAL

SEQ ID NO: 6037 - protein, 15 aa, Homo sapiens
MPCSRLLPSLRCSLH

SEQ ID NO: 6038 - protein, 15 aa, Homo sapiens
TPAGPMPCSRLLPSL

SEQ ID NO: 6039 - protein, 15 aa, Homo sapiens
AGPMPCSRLLPSLRC

SEQ ID NO: 6040 - protein, 15 aa, Homo sapiens
CSRLLPSLRCSLHSA

SEQ ID NO: 6041 - protein, 15 aa, Homo sapiens
SRLLPSLRCSLHSAC

SEQ ID NO: 6042 - protein, 15 aa, Homo sapiens
RLLPSLRCSLHSACC

SEQ ID NO: 6043 - protein, 15 aa, Homo sapiens
ATPAGPMPCSRLLPS

SEQ ID NO: 6044 - protein, 15 aa, Homo sapiens
PMPCSRLLPSLRCSL

SEQ ID NO: 6045 - protein, 15 aa, Homo sapiens
PCSRLLPSLRCSLHS

SEQ ID NO: 6046 - protein, 15 aa, Homo sapiens
LPSLRCSLHSACCSG

SEQ ID NO: 6047 - protein, 15 aa, Homo sapiens
TCATPAGPMPCSRLL

SEQ ID NO: 6048 - protein, 15 aa, Homo sapiens
PAGPMPCSRLLPSLR

SEQ ID NO: 6049 - protein, 15 aa, Homo sapiens
GPMPCSRLLPSLRCS

SEQ ID NO: 6050 - protein, 15 aa, Homo sapiens
LLPSLRCSLHSACCS

SEQ ID NO: 6051 - protein, 15 aa, Homo sapiens
DPASSRLWGAPLQPT

SEQ ID NO: 6052 - protein, 15 aa, Homo sapiens
SRLWGAPLQPTLGVV

SEQ ID NO: 6053 - protein, 15 aa, Homo sapiens
SLHSACCSGDPASSR

SEQ ID NO: 6054 - protein, 15 aa, Homo sapiens
CSLHSACCSGDPASS

SEQ ID NO: 6055 - protein, 15 aa, Homo sapiens
HSACCSGDPASSRLW

SEQ ID NO: 6056 - protein, 15 aa, Homo sapiens
ACCSGDPASSRLWGA

SEQ ID NO: 6057 - protein, 15 aa, Homo sapiens
ASSRLWGAPLQPTLG

SEQ ID NO: 6058 - protein, 15 aa, Homo sapiens
PASSRLWGAPLQPTL

SEQ ID NO: 6059 - protein, 15 aa, Homo sapiens
TLGVVPQASVPLLTD

SEQ ID NO: 6060 - protein, 15 aa, Homo sapiens
PQASVPLLTDPAQWE

SEQ ID NO: 6061 - protein, 15 aa, Homo sapiens
QASVPLLTDPAQWEP

SEQ ID NO: 6062 - protein, 15 aa, Homo sapiens
VPLLTDPAQWEPVLV

SEQ ID NO: 6063 - protein, 15 aa, Homo sapiens
LGVVPQASVPLLTDP

SEQ ID NO: 6064 - protein, 15 aa, Homo sapiens
SVPLLTDPAQWEPVL

SEQ ID NO: 6065 - protein, 15 aa, Homo sapiens
LTDPAQWEPVLVPEA

SEQ ID NO: 6066 - protein, 15 aa, Homo sapiens
LLTDPAQWEPVLVPE

SEQ ID NO: 6067 - protein, 15 aa, Homo sapiens
VPLLTDLAQWEPVLV

SEQ ID NO: 6068 - protein, 15 aa, Homo sapiens
PQASVPLLTDLAQWE

SEQ ID NO: 6069 - protein, 15 aa, Homo sapiens
LTDLAQWEPVLVPEA

SEQ ID NO: 6070 - protein, 15 aa, Homo sapiens
QASVPLLTDLAQWEP

SEQ ID NO: 6071 - protein, 15 aa, Homo sapiens
LGVVPQASVPLLTDL

SEQ ID NO: 6072 - protein, 15 aa, Homo sapiens
SVPLLTDLAQWEPVL

SEQ ID NO: 6073 - protein, 15 aa, Homo sapiens
LLTDLAQWEPVLVPE

SEQ ID NO: 6074 - protein, 15 aa, Homo sapiens
VPLLTHLAQWEPVLV

SEQ ID NO: 6075 - protein, 15 aa, Homo sapiens
LAQWEPVLVPEAHPN

SEQ ID NO: 6076 - protein, 15 aa, Homo sapiens
PQASVPLLTHLAQWE

SEQ ID NO: 6077 - protein, 15 aa, Homo sapiens
LTHLAQWEPVLVPEA

SEQ ID NO: 6078 - protein, 15 aa, Homo sapiens
QASVPLLTHLAQWEP

SEQ ID NO: 6079 - protein, 15 aa, Homo sapiens
LGVVPQASVPLLTHL

SEQ ID NO: 6080 - protein, 15 aa, Homo sapiens
SVPLLTHLAQWEPVL

SEQ ID NO: 6081 - protein, 15 aa, Homo sapiens
LLTHLAQWEPVLVPE

SEQ ID NO: 6082 - protein, 15 aa, Homo sapiens
CTPVPHPDPPMALSR

SEQ ID NO: 6083 - protein, 15 aa, Homo sapiens
ASLTMYVCTPVPHPD

SEQ ID NO: 6084 - protein, 15 aa, Homo sapiens
NASLTMYVCTPVPHP

SEQ ID NO: 6085 - protein, 15 aa, Homo sapiens
LTMYVCTPVPHPDPP

SEQ ID NO: 6086 - protein, 15 aa, Homo sapiens
EAHPNASLTMYVCTP

SEQ ID NO: 6087 - protein, 15 aa, Homo sapiens
MYVCTPVPHPDPPMA

SEQ ID NO: 6088 - protein, 15 aa, Homo sapiens
PNASLTMYVCTPVPH

SEQ ID NO: 6089 - protein, 15 aa, Homo sapiens
SLTMYVCTPVPHPDP

SEQ ID NO: 6090 - protein, 15 aa, Homo sapiens
TMYVCTPVPHPDPPM

SEQ ID NO: 6091 - protein, 15 aa, Homo sapiens
YVCTPVPHPDPPMAL

SEQ ID NO: 6092 - protein, 15 aa, Homo sapiens
TPVPHPDPPMALSRT

SEQ ID NO: 6093 - protein, 15 aa, Homo sapiens
TRQISSIDTDPPADG

SEQ ID NO: 6094 - protein, 15 aa, Homo sapiens
PMALSRTPTRQISSI

SEQ ID NO: 6095 - protein, 15 aa, Homo sapiens
SSIDTDPPADGPSNP

SEQ ID NO: 6096 - protein, 15 aa, Homo sapiens
DPPMALSRTPTRQIS

SEQ ID NO: 6097 - protein, 15 aa, Homo sapiens
RTPTRQISSIDTDPP

SEQ ID NO: 6098 - protein, 15 aa, Homo sapiens
ISSIDTDPPADGPSN

SEQ ID NO: 6099 - protein, 15 aa, Homo sapiens
SRTPTRQISSIDTDP

SEQ ID NO: 6100 - protein, 15 aa, Homo sapiens
PMALSRTPTRQISSS

SEQ ID NO: 6101 - protein, 15 aa, Homo sapiens
TRQISSSDTDPPADG

SEQ ID NO: 6102 - protein, 15 aa, Homo sapiens
SSSDTDPPADGPSNP

SEQ ID NO: 6103 - protein, 15 aa, Homo sapiens
RTPTRQISSSDTDPP

SEQ ID NO: 6104 - protein, 15 aa, Homo sapiens
SRTPTRQISSSDTDP

SEQ ID NO: 6105 - protein, 15 aa, Homo sapiens
PMALSRTPTRQIGSS

SEQ ID NO: 6106 - protein, 15 aa, Homo sapiens
TRQIGSSDTDPPADG

SEQ ID NO: 6107 - protein, 15 aa, Homo sapiens
GSSDTDPPADGPSNP

SEQ ID NO: 6108 - protein, 15 aa, Homo sapiens
SRTPTRQIGSSDTDP

SEQ ID NO: 6109 - protein, 15 aa, Homo sapiens
RTPTRQIGSSDTDPP

SEQ ID NO: 6110 - protein, 15 aa, Homo sapiens
ALSRTPTRQIGSSDT

SEQ ID NO: 6111 - protein, 15 aa, Homo sapiens
VVSPAPSRQQALRRA

SEQ ID NO: 6112 - protein, 15 aa, Homo sapiens
SLNCVDDSQDYYVGK

SEQ ID NO: 6113 - protein, 15 aa, Homo sapiens
ILALLPALGLLLWGP

SEQ ID NO: 6114 - protein, 15 aa, Homo sapiens
KAVLLALLMAGLALQ

SEQ ID NO: 6115 - protein, 15 aa, Homo sapiens
MAGLALQPGTALLCY

SEQ ID NO: 6116 - protein, 15 aa, Homo sapiens
AAILALLPALGLLLW

SEQ ID NO: 6117 - protein, 15 aa, Homo sapiens
CSLNCVDDSQDYYVG

SEQ ID NO: 6118 - protein, 15 aa, Homo sapiens
EDCLQVENCTQLGEQ

SEQ ID NO: 6119 - protein, 15 aa, Homo sapiens
VGLLTVISKGCSLNC

SEQ ID NO: 6120 - protein, 15 aa, Homo sapiens
TALLCYSCKAQVSNE

SEQ ID NO: 6121 - protein, 15 aa, Homo sapiens
CLQVENCTQLGEQCW

SEQ ID NO: 6122 - protein, 15 aa, Homo sapiens
LLALLMAGLALQPGT

SEQ ID NO: 6123 - protein, 15 aa, Homo sapiens
MKAVLLALLMAGLAL

SEQ ID NO: 6124 - protein, 15 aa, Homo sapiens
AAAILALLPALGLLL

SEQ ID NO: 6125 - protein, 15 aa, Homo sapiens
GTALLCYSCKAQVSN

SEQ ID NO: 6126 - protein, 15 aa, Homo sapiens
SCKAQVSNEDCLQVE

SEQ ID NO: 6127 - protein, 15 aa, Homo sapiens
LLTVISKGCSLNCVD

SEQ ID NO: 6128 - protein, 15 aa, Homo sapiens
VLLALLMAGLALQPG

SEQ ID NO: 6129 - protein, 15 aa, Homo sapiens
AGLALQPGTALLCYS

SEQ ID NO: 6130 - protein, 15 aa, Homo sapiens
GLALQPGTALLCYSC

SEQ ID NO: 6131 - protein, 15 aa, Homo sapiens
TARIRAVGLLTVISK

SEQ ID NO: 6132 - protein, 15 aa, Homo sapiens
ITCCDTDLCNASGAH

SEQ ID NO: 6133 - protein, 15 aa, Homo sapiens
LALLPALGLLLWGPG

SEQ ID NO: 6134 - protein, 15 aa, Homo sapiens
AVLLALLMAGLALQP

SEQ ID NO: 6135 - protein, 15 aa, Homo sapiens
LALLMAGLALQPGTA

SEQ ID NO: 6136 - protein, 15 aa, Homo sapiens
AQVSNEDCLQVENCT

SEQ ID NO: 6137 - protein, 15 aa, Homo sapiens
CTQLGEQCWTARIRA

SEQ ID NO: 6138 - protein, 15 aa, Homo sapiens
AVGLLTVISKGCSLN

SEQ ID NO: 6139 - protein, 15 aa, Homo sapiens
LTVISKGCSLNCVDD

SEQ ID NO: 6140 - protein, 15 aa, Homo sapiens
KKNITCCDTDLCNAS

SEQ ID NO: 6141 - protein, 15 aa, Homo sapiens
DTDLCNASGAHALQP

SEQ ID NO: 6142 - protein, 15 aa, Homo sapiens
AHALQPAAAILALLP

SEQ ID NO: 6143 - protein, 15 aa, Homo sapiens
PAAAILALLPALGLL

SEQ ID NO: 6144 - protein, 15 aa, Homo sapiens
AILALLPALGLLLWG

SEQ ID NO: 6145 - protein, 15 aa, Homo sapiens
FSTLNPVLRHLFPQE

SEQ ID NO: 6146 - protein, 15 aa, Homo sapiens
CSRLPPSLRCSLHSA

SEQ ID NO: 6147 - protein, 15 aa, Homo sapiens
IGSIDTDPPADGPSN

SEQ ID NO: 6148 - protein, 15 aa, Homo sapiens
TLGVVPQASVPLLTH

SEQ ID NO: 6149 - protein, 15 aa, Homo sapiens
APVPHPDPPMALSRT

SEQ ID NO: 6150 - protein, 15 aa, Homo sapiens
LGVVPQASVPLLTHP

SEQ ID NO: 6151 - protein, 15 aa, Homo sapiens
QPTLGVVPQASVPLL

SEQ ID NO: 6152 - protein, 15 aa, Homo sapiens
AHPIYDLSQVWSVVS

SEQ ID NO: 6153 - protein, 15 aa, Homo sapiens
VPLLTHPAQWEPVLV

SEQ ID NO: 6154 - protein, 15 aa, Homo sapiens
PVLRHLFPQEAFPAH

SEQ ID NO: 6155 - protein, 15 aa, Homo sapiens
QEAFPAHPIYDLSQV

SEQ ID NO: 6156 - protein, 15 aa, Homo sapiens
VLVPEAHPNASLTMY

SEQ ID NO: 6157 - protein, 15 aa, Homo sapiens
CCCFHGPAFSTLNPV

SEQ ID NO: 6158 - protein, 15 aa, Homo sapiens
HGPAFSTLNPVLRHL

SEQ ID NO: 6159 - protein, 15 aa, Homo sapiens
YRLWGAPLQPTLGVV

SEQ ID NO: 6160 - protein, 15 aa, Homo sapiens
SVPLLTHPAQWEPVL

SEQ ID NO: 6161 - protein, 15 aa, Homo sapiens
LLTHPAQWEPVLVPE

SEQ ID NO: 6162 - protein, 15 aa, Homo sapiens
PPSLRCSLHSACCSG

SEQ ID NO: 6163 - protein, 15 aa, Homo sapiens
GAPLQPTLGVVPQAS

SEQ ID NO: 6164 - protein, 15 aa, Homo sapiens
WEPVLVPEAHPNASL

SEQ ID NO: 6165 - protein, 15 aa, Homo sapiens
EPVLVPEAHPNASLT

SEQ ID NO: 6166 - protein, 15 aa, Homo sapiens
PVLVPEAHPNASLTM

SEQ ID NO: 6167 - protein, 15 aa, Homo sapiens
NASLTMYVCAPVPHP

SEQ ID NO: 6168 - protein, 15 aa, Homo sapiens
LNPVLRHLFPQEAFP

SEQ ID NO: 6169 - protein, 15 aa, Homo sapiens
PAHPIYDLSQVWSVV

SEQ ID NO: 6170 - protein, 15 aa, Homo sapiens
CSRLLPSLRCSLHSA

SEQ ID NO: 6171 - protein, 15 aa, Homo sapiens
LPSLRCSLHSACCSG

SEQ ID NO: 6172 - protein, 15 aa, Homo sapiens
SRLWGAPLQPTLGVV

SEQ ID NO: 6173 - protein, 15 aa, Homo sapiens
SSRLWGAPLQPTLGV

SEQ ID NO: 6174 - protein, 15 aa, Homo sapiens
SACCSGDPASSRLWG

SEQ ID NO: 6175 - protein, 15 aa, Homo sapiens
DPASSRLWGAPLQPT

SEQ ID NO: 6176 - protein, 15 aa, Homo sapiens
ACCSGDPASSRLWGA

SEQ ID NO: 6177 - protein, 15 aa, Homo sapiens
CSGDPASSRLWGAPL

SEQ ID NO: 6178 - protein, 15 aa, Homo sapiens
SVPLLTDPAQWEPVL

SEQ ID NO: 6179 - protein, 15 aa, Homo sapiens
TLGVVPQASVPLLTD

SEQ ID NO: 6180 - protein, 15 aa, Homo sapiens
LGVVPQASVPLLTDP

SEQ ID NO: 6181 - protein, 15 aa, Homo sapiens
VPLLTDPAQWEPVLV

SEQ ID NO: 6182 - protein, 15 aa, Homo sapiens
LLTDPAQWEPVLVPE

SEQ ID NO: 6183 - protein, 15 aa, Homo sapiens
QASVPLLTDPAQWEP

SEQ ID NO: 6184 - protein, 15 aa, Homo sapiens
SVPLLTDLAQWEPVL

SEQ ID NO: 6185 - protein, 15 aa, Homo sapiens
LGVVPQASVPLLTDL

SEQ ID NO: 6186 - protein, 15 aa, Homo sapiens
VPLLTDLAQWEPVLV

SEQ ID NO: 6187 - protein, 15 aa, Homo sapiens
LLTDLAQWEPVLVPE

SEQ ID NO: 6188 - protein, 15 aa, Homo sapiens
QASVPLLTDLAQWEP

SEQ ID NO: 6189 - protein, 15 aa, Homo sapiens
LTDLAQWEPVLVPEA

SEQ ID NO: 6190 - protein, 15 aa, Homo sapiens
LGVVPQASVPLLTHL

SEQ ID NO: 6191 - protein, 15 aa, Homo sapiens
VPLLTHLAQWEPVLV

SEQ ID NO: 6192 - protein, 15 aa, Homo sapiens
LLTHLAQWEPVLVPE

SEQ ID NO: 6193 - protein, 15 aa, Homo sapiens
SVPLLTHLAQWEPVL

SEQ ID NO: 6194 - protein, 15 aa, Homo sapiens
QASVPLLTHLAQWEP

SEQ ID NO: 6195 - protein, 15 aa, Homo sapiens
LTHLAQWEPVLVPEA

SEQ ID NO: 6196 - protein, 15 aa, Homo sapiens
VPQASVPLLTHLAQW

SEQ ID NO: 6197 - protein, 15 aa, Homo sapiens
TPVPHPDPPMALSRT

SEQ ID NO: 6198 - protein, 15 aa, Homo sapiens
NASLTMYVCTPVPHP

SEQ ID NO: 6199 - protein, 15 aa, Homo sapiens
SLTMYVCTPVPHPDP

SEQ ID NO: 6200 - protein, 15 aa, Homo sapiens
TMYVCTPVPHPDPPM

SEQ ID NO: 6201 - protein, 15 aa, Homo sapiens
CTPVPHPDPPMALSR

SEQ ID NO: 6202 - protein, 15 aa, Homo sapiens
ISSIDTDPPADGPSN

SEQ ID NO: 6203 - protein, 15 aa, Homo sapiens
DPPMALSRTPTRQIS

SEQ ID NO: 6204 - protein, 15 aa, Homo sapiens
PMALSRTPTRQISSI

SEQ ID NO: 6205 - protein, 15 aa, Homo sapiens
TRQISSIDTDPPADG

SEQ ID NO: 6206 - protein, 15 aa, Homo sapiens
RQISSIDTDPPADGP

SEQ ID NO: 6207 - protein, 15 aa, Homo sapiens
ISSSDTDPPADGPSN

SEQ ID NO: 6208 - protein, 15 aa, Homo sapiens
PMALSRTPTRQISSS

SEQ ID NO: 6209 - protein, 15 aa, Homo sapiens
TRQISSSDTDPPADG

SEQ ID NO: 6210 - protein, 15 aa, Homo sapiens
RQISSSDTDPPADGP

SEQ ID NO: 6211 - protein, 15 aa, Homo sapiens
MALSRTPTRQISSSD

SEQ ID NO: 6212 - protein, 15 aa, Homo sapiens
ALSRTPTRQISSSDT

SEQ ID NO: 6213 - protein, 15 aa, Homo sapiens
IGSSDTDPPADGPSN

SEQ ID NO: 6214 - protein, 15 aa, Homo sapiens
PMALSRTPTRQIGSS

SEQ ID NO: 6215 - protein, 15 aa, Homo sapiens
TRQIGSSDTDPPADG

SEQ ID NO: 6216 - protein, 15 aa, Homo sapiens
RQIGSSDTDPPADGP

SEQ ID NO: 6217 - protein, 15 aa, Homo sapiens
MALSRTPTRQIGSSD

SEQ ID NO: 6218 - protein, 15 aa, Homo sapiens
ALSRTPTRQIGSSDT

SEQ ID NO: 6219 - protein, 15 aa, Homo sapiens
VVSPAPSRQQALRRA

SEQ ID NO: 6220 - protein, 15 aa, Homo sapiens
VSPAPSRQQALRRAQ

SEQ ID NO: 6221 - protein, 15 aa, Homo sapiens
KAVLLALLMAGLALQ

SEQ ID NO: 6222 - protein, 15 aa, Homo sapiens
AVLLALLMAGLALQP

SEQ ID NO: 6223 - protein, 15 aa, Homo sapiens
LLALLMAGLALQPGT

SEQ ID NO: 6224 - protein, 15 aa, Homo sapiens
KAQVSNEDCLQVENC

SEQ ID NO: 6225 - protein, 15 aa, Homo sapiens
EDCLQVENCTQLGEQ

SEQ ID NO: 6226 - protein, 15 aa, Homo sapiens
TARIRAVGLLTVISK

SEQ ID NO: 6227 - protein, 15 aa, Homo sapiens
IRAVGLLTVISKGCS

SEQ ID NO: 6228 - protein, 15 aa, Homo sapiens
AVGLLTVISKGCSLN

SEQ ID NO: 6229 - protein, 15 aa, Homo sapiens
VGLLTVISKGCSLNC

SEQ ID NO: 6230 - protein, 15 aa, Homo sapiens
DTDLCNASGAHALQP

SEQ ID NO: 6231 - protein, 15 aa, Homo sapiens
AHALQPAAAILALLP

SEQ ID NO: 6232 - protein, 15 aa, Homo sapiens
AAILALLPALGLLLW

SEQ ID NO: 6233 - protein, 15 aa, Homo sapiens
ILALLPALGLLLWGP

SEQ ID NO: 6234 - protein, 15 aa, Homo sapiens
LLMAGLALQPGTALL

SEQ ID NO: 6235 - protein, 15 aa, Homo sapiens
NEDCLQVENCTQLGE

SEQ ID NO: 6236 - protein, 15 aa, Homo sapiens
RIRAVGLLTVISKGC

SEQ ID NO: 6237 - protein, 15 aa, Homo sapiens
NASGAHALQPAAAIL

SEQ ID NO: 6238 - protein, 15 aa, Homo sapiens
LLCYSCKAQVSNEDC

SEQ ID NO: 6239 - protein, 15 aa, Homo sapiens
SQDYYVGKKNITCCD

SEQ ID NO: 6240 - protein, 15 aa, Homo sapiens
MKAVLLALLMAGLAL

SEQ ID NO: 6241 - protein, 15 aa, Homo sapiens
ALLMAGLALQPGTAL

SEQ ID NO: 6242 - protein, 15 aa, Homo sapiens
MAGLALQPGTALLCY

SEQ ID NO: 6243 - protein, 15 aa, Homo sapiens
GTALLCYSCKAQVSN

SEQ ID NO: 6244 - protein, 15 aa, Homo sapiens
TALLCYSCKAQVSNE

SEQ ID NO: 6245 - protein, 15 aa, Homo sapiens
CLQVENCTQLGEQCW

SEQ ID NO: 6246 - protein, 15 aa, Homo sapiens
LTVISKGCSLNCVDD

SEQ ID NO: 6247 - protein, 15 aa, Homo sapiens
GCSLNCVDDSQDYYV

SEQ ID NO: 6248 - protein, 15 aa, Homo sapiens
LNCVDDSQDYYVGKK

SEQ ID NO: 6249 - protein, 15 aa, Homo sapiens
KKNITCCDTDLCNAS

SEQ ID NO: 6250 - protein, 15 aa, Homo sapiens
AAAILALLPALGLLL

SEQ ID NO: 6251 - protein, 15 aa, Homo sapiens
LALLPALGLLLWGPG

SEQ ID NO: 6252 - protein, 15 aa, Homo sapiens
LMAGLALQPGTALLC

SEQ ID NO: 6253 - protein, 15 aa, Homo sapiens
AGLALQPGTALLCYS

SEQ ID NO: 6254 - protein, 15 aa, Homo sapiens
ALQPGTALLCYSCKA

SEQ ID NO: 6255 - protein, 15 aa, Homo sapiens
QPGTALLCYSCKAQV

SEQ ID NO: 6256 - protein, 15 aa, Homo sapiens
PGTALLCYSCKAQVS

SEQ ID NO: 6257 - protein, 15 aa, Homo sapiens
YSCKAQVSNEDCLQV

SEQ ID NO: 6258 - protein, 15 aa, Homo sapiens
QVSNEDCLQVENCTQ

SEQ ID NO: 6259 - protein, 15 aa, Homo sapiens
ENCTQLGEQCWTARI

SEQ ID NO: 6260 - protein, 15 aa, Homo sapiens
NCTQLGEQCWTARIR

SEQ ID NO: 6261 - protein, 15 aa, Homo sapiens
TQLGEQCWTARIRAV

SEQ ID NO: 6262 - protein, 15 aa, Homo sapiens
LGEQCWTARIRAVGL

SEQ ID NO: 6263 - protein, 15 aa, Homo sapiens
GEQCWTARIRAVGLL

SEQ ID NO: 6264 - protein, 15 aa, Homo sapiens
QCWTARIRAVGLLTV

SEQ ID NO: 6265 - protein, 15 aa, Homo sapiens
WTARIRAVGLLTVIS

SEQ ID NO: 6266 - protein, 15 aa, Homo sapiens
CSLNCVDDSQDYYVG

SEQ ID NO: 6267 - protein, 15 aa, Homo sapiens
SLNCVDDSQDYYVGK

SEQ ID NO: 6268 - protein, 15 aa, Homo sapiens
CVDDSQDYYVGKKNI

SEQ ID NO: 6269 - protein, 15 aa, Homo sapiens
DSQDYYVGKKNITCC

SEQ ID NO: 6270 - protein, 15 aa, Homo sapiens
YVGKKNITCCDTDLC

SEQ ID NO: 6271 - protein, 15 aa, Homo sapiens
KNITCCDTDLCNASG

SEQ ID NO: 6272 - protein, 15 aa, Homo sapiens
ITCCDTDLCNASGAH

SEQ ID NO: 6273 - protein, 15 aa, Homo sapiens
TCCDTDLCNASGAHA

SEQ ID NO: 6274 - protein, 15 aa, Homo sapiens
DLCNASGAHALQPAA

SEQ ID NO: 6275 - protein, 15 aa, Homo sapiens
ASGAHALQPAAAILA

SEQ ID NO: 6276 - protein, 15 aa, Homo sapiens
HALQPAAAILALLPA

SEQ ID NO: 6277 - protein, 15 aa, Homo sapiens
ALQPAAAILALLPAL

SEQ ID NO: 6278 - protein, 15 aa, Homo sapiens
QPAAAILALLPALGL

SEQ ID NO: 6279 - protein, 15 aa, Homo sapiens
PAAAILALLPALGLL

SEQ ID NO: 6280 - protein, 15 aa, Homo sapiens
EQCWTARIRAVGLLT

SEQ ID NO: 6281 - protein, 15 aa, Homo sapiens
QDYYVGKKNITCCDT

SEQ ID NO: 6282 - protein, 15 aa, Homo sapiens
LLTVISKGCSLNCVD

SEQ ID NO: 6283 - protein, 15 aa, Homo sapiens
QPTLGVVPQASVPLL

SEQ ID NO: 6284 - protein, 15 aa, Homo sapiens
QASVPLLTHPAQWEP

SEQ ID NO: 6285 - protein, 15 aa, Homo sapiens
EPVLVPEAHPNASLT

SEQ ID NO: 6286 - protein, 15 aa, Homo sapiens
AHPIYDLSQVWSVVS

SEQ ID NO: 6287 - protein, 15 aa, Homo sapiens
IYDLSQVWSVVSPAP

SEQ ID NO: 6288 - protein, 15 aa, Homo sapiens
WSVVSPAPSRGQALR

SEQ ID NO: 6289 - protein, 15 aa, Homo sapiens
YRLWGAPLQPTLGVV

SEQ ID NO: 6290 - protein, 15 aa, Homo sapiens
PAQWEPVLVPEAHPN

SEQ ID NO: 6291 - protein, 15 aa, Homo sapiens
SQVWSVVSPAPSRGQ

SEQ ID NO: 6292 - protein, 15 aa, Homo sapiens
CSRLPPSLRCSLHSA

SEQ ID NO: 6293 - protein, 15 aa, Homo sapiens
SYRLWGAPLQPTLGV

SEQ ID NO: 6294 - protein, 15 aa, Homo sapiens
TLGVVPQASVPLLTH

SEQ ID NO: 6295 - protein, 15 aa, Homo sapiens
LGVVPQASVPLLTHP

SEQ ID NO: 6296 - protein, 15 aa, Homo sapiens
PVLVPEAHPNASLTM

SEQ ID NO: 6297 - protein, 15 aa, Homo sapiens
PMALSRTPTRQIGSI

SEQ ID NO: 6298 - protein, 15 aa, Homo sapiens
TRQIGSIDTDPPADG

SEQ ID NO: 6299 - protein, 15 aa, Homo sapiens
SNPLCCCFHGPAFST

SEQ ID NO: 6300 - protein, 15 aa, Homo sapiens
FSTLNPVLRHLFPQE

SEQ ID NO: 6301 - protein, 15 aa, Homo sapiens
NPVLRHLFPQEAFPA

SEQ ID NO: 6302 - protein, 15 aa, Homo sapiens
LSQVWSVVSPAPSRG

SEQ ID NO: 6303 - protein, 15 aa, Homo sapiens
PQASVPLLTHPAQWE

SEQ ID NO: 6304 - protein, 15 aa, Homo sapiens
PDPPMALSRTPTRQI

SEQ ID NO: 6305 - protein, 15 aa, Homo sapiens
RTPTRQIGSIDTDPP

SEQ ID NO: 6306 - protein, 15 aa, Homo sapiens
CCFHGPAFSTLNPVL

SEQ ID NO: 6307 - protein, 15 aa, Homo sapiens
TTTWARRTSRAVTPT

SEQ ID NO: 6308 - protein, 15 aa, Homo sapiens
PASYRLWGAPLQPTL

SEQ ID NO: 6309 - protein, 15 aa, Homo sapiens
LTMYVCAPVPHPDPP

SEQ ID NO: 6310 - protein, 15 aa, Homo sapiens
CCCFHGPAFSTLNPV

SEQ ID NO: 6311 - protein, 15 aa, Homo sapiens
GPAFSTLNPVLRHLF

SEQ ID NO: 6312 - protein, 15 aa, Homo sapiens
RHLFPQEAFPAHPIY

SEQ ID NO: 6313 - protein, 15 aa, Homo sapiens
QEAFPAHPIYDLSQV

SEQ ID NO: 6314 - protein, 15 aa, Homo sapiens
HPIYDLSQVWSVVSP

SEQ ID NO: 6315 - protein, 15 aa, Homo sapiens
SRAVTPTCATPAGPM

SEQ ID NO: 6316 - protein, 15 aa, Homo sapiens
AGPMPCSRLPPSLRC

SEQ ID NO: 6317 - protein, 15 aa, Homo sapiens
PPSLRCSLHSACCSG

SEQ ID NO: 6318 - protein, 15 aa, Homo sapiens
RCSLHSACCSGDPAS

SEQ ID NO: 6319 - protein, 15 aa, Homo sapiens
VPLLTHPAQWEPVLV

SEQ ID NO: 6320 - protein, 15 aa, Homo sapiens
WEPVLVPEAHPNASL

SEQ ID NO: 6321 - protein, 15 aa, Homo sapiens
NASLTMYVCAPVPHP

SEQ ID NO: 6322 - protein, 15 aa, Homo sapiens
CAPVPHPDPPMALSR

SEQ ID NO: 6323 - protein, 15 aa, Homo sapiens
DPPMALSRTPTRQIG

SEQ ID NO: 6324 - protein, 15 aa, Homo sapiens
IGSIDTDPPADGPSN

SEQ ID NO: 6325 - protein, 15 aa, Homo sapiens
LRHLFPQEAFPAHPI

SEQ ID NO: 6326 - protein, 15 aa, Homo sapiens
THRTTTWARRTSRAV

SEQ ID NO: 6327 - protein, 15 aa, Homo sapiens
HRTTTWARRTSRAVT

SEQ ID NO: 6328 - protein, 15 aa, Homo sapiens
TTWARRTSRAVTPTC

SEQ ID NO: 6329 - protein, 15 aa, Homo sapiens
ARRTSRAVTPTCATP

SEQ ID NO: 6330 - protein, 15 aa, Homo sapiens
RRTSRAVTPTCATPA

SEQ ID NO: 6331 - protein, 15 aa, Homo sapiens
RTSRAVTPTCATPAG

SEQ ID NO: 6332 - protein, 15 aa, Homo sapiens
PSLRCSLHSACCSGD

SEQ ID NO: 6333 - protein, 15 aa, Homo sapiens
ACCSGDPASYRLWGA

SEQ ID NO: 6334 - protein, 15 aa, Homo sapiens
DPASYRLWGAPLQPT

SEQ ID NO: 6335 - protein, 15 aa, Homo sapiens
LWGAPLQPTLGVVPQ

SEQ ID NO: 6336 - protein, 15 aa, Homo sapiens
APLQPTLGVVPQASV

SEQ ID NO: 6337 - protein, 15 aa, Homo sapiens
LQPTLGVVPQASVPL

SEQ ID NO: 6338 - protein, 15 aa, Homo sapiens
PLLTHPAQWEPVLVP

SEQ ID NO: 6339 - protein, 15 aa, Homo sapiens
VLVPEAHPNASLTMY

SEQ ID NO: 6340 - protein, 15 aa, Homo sapiens
VPEAHPNASLTMYVC

SEQ ID NO: 6341 - protein, 15 aa, Homo sapiens
EAHPNASLTMYVCAP

SEQ ID NO: 6342 - protein, 15 aa, Homo sapiens
MYVCAPVPHPDPPMA

SEQ ID NO: 6343 - protein, 15 aa, Homo sapiens
APVPHPDPPMALSRT

SEQ ID NO: 6344 - protein, 15 aa, Homo sapiens
HPDPPMALSRTPTRQ

SEQ ID NO: 6345 - protein, 15 aa, Homo sapiens
ALSRTPTRQIGSIDT

SEQ ID NO: 6346 - protein, 15 aa, Homo sapiens
RQIGSIDTDPPADGP

SEQ ID NO: 6347 - protein, 15 aa, Homo sapiens
IDTDPPADGPSNPLC

SEQ ID NO: 6348 - protein, 15 aa, Homo sapiens
TDPPADGPSNPLCCC

SEQ ID NO: 6349 - protein, 15 aa, Homo sapiens
CFHGPAFSTLNPVLR

SEQ ID NO: 6350 - protein, 15 aa, Homo sapiens
HGPAFSTLNPVLRHL

SEQ ID NO: 6351 - protein, 15 aa, Homo sapiens
STLNPVLRHLFPQEA

SEQ ID NO: 6352 - protein, 15 aa, Homo sapiens
PVLRHLFPQEAFPAH

SEQ ID NO: 6353 - protein, 15 aa, Homo sapiens
LFPQEAFPAHPIYDL

SEQ ID NO: 6354 - protein, 15 aa, Homo sapiens
AFPAHPIYDLSQVWS

SEQ ID NO: 6355 - protein, 15 aa, Homo sapiens
PAHPIYDLSQVWSVV

SEQ ID NO: 6356 - protein, 15 aa, Homo sapiens
SVVSPAPSRGQALRR

SEQ ID NO: 6357 - protein, 15 aa, Homo sapiens
CSRLLPSLRCSLHSA

SEQ ID NO: 6358 - protein, 15 aa, Homo sapiens
AGPMPCSRLLPSLRC

SEQ ID NO: 6359 - protein, 15 aa, Homo sapiens
SRLLPSLRCSLHSAC

SEQ ID NO: 6360 - protein, 15 aa, Homo sapiens
LPSLRCSLHSACCSG

SEQ ID NO: 6361 - protein, 15 aa, Homo sapiens
TPAGPMPCSRLLPSL

SEQ ID NO: 6362 - protein, 15 aa, Homo sapiens
MPCSRLLPSLRCSLH

SEQ ID NO: 6363 - protein, 15 aa, Homo sapiens
SRLWGAPLQPTLGVV

SEQ ID NO: 6364 - protein, 15 aa, Homo sapiens
SSRLWGAPLQPTLGV

SEQ ID NO: 6365 - protein, 15 aa, Homo sapiens
ACCSGDPASSRLWGA

SEQ ID NO: 6366 - protein, 15 aa, Homo sapiens
CCSGDPASSRLWGAP

SEQ ID NO: 6367 - protein, 15 aa, Homo sapiens
DPASSRLWGAPLQPT

SEQ ID NO: 6368 - protein, 15 aa, Homo sapiens
TLGVVPQASVPLLTD

SEQ ID NO: 6369 - protein, 15 aa, Homo sapiens
LGVVPQASVPLLTDP

SEQ ID NO: 6370 - protein, 15 aa, Homo sapiens
QASVPLLTDPAQWEP

SEQ ID NO: 6371 - protein, 15 aa, Homo sapiens
PQASVPLLTDPAQWE

SEQ ID NO: 6372 - protein, 15 aa, Homo sapiens
SVPLLTDPAQWEPVL

SEQ ID NO: 6373 - protein, 15 aa, Homo sapiens
VPLLTDPAQWEPVLV

SEQ ID NO: 6374 - protein, 15 aa, Homo sapiens
PLLTDPAQWEPVLVP

SEQ ID NO: 6375 - protein, 15 aa, Homo sapiens
LGVVPQASVPLLTDL

SEQ ID NO: 6376 - protein, 15 aa, Homo sapiens
QASVPLLTDLAQWEP

SEQ ID NO: 6377 - protein, 15 aa, Homo sapiens
VPLLTDLAQWEPVLV

SEQ ID NO: 6378 - protein, 15 aa, Homo sapiens
PQASVPLLTDLAQWE

SEQ ID NO: 6379 - protein, 15 aa, Homo sapiens
SVPLLTDLAQWEPVL

SEQ ID NO: 6380 - protein, 15 aa, Homo sapiens
LTDLAQWEPVLVPEA

SEQ ID NO: 6381 - protein, 15 aa, Homo sapiens
PLLTDLAQWEPVLVP

SEQ ID NO: 6382 - protein, 15 aa, Homo sapiens
QASVPLLTHLAQWEP

SEQ ID NO: 6383 - protein, 15 aa, Homo sapiens
LAQWEPVLVPEAHPN

SEQ ID NO: 6384 - protein, 15 aa, Homo sapiens
LGVVPQASVPLLTHL

SEQ ID NO: 6385 - protein, 15 aa, Homo sapiens
VPLLTHLAQWEPVLV

SEQ ID NO: 6386 - protein, 15 aa, Homo sapiens
PQASVPLLTHLAQWE

SEQ ID NO: 6387 - protein, 15 aa, Homo sapiens
LTHLAQWEPVLVPEA

SEQ ID NO: 6388 - protein, 15 aa, Homo sapiens
PLLTHLAQWEPVLVP

SEQ ID NO: 6389 - protein, 15 aa, Homo sapiens
NASLTMYVCTPVPHP

SEQ ID NO: 6390 - protein, 15 aa, Homo sapiens
CTPVPHPDPPMALSR

SEQ ID NO: 6391 - protein, 15 aa, Homo sapiens
EAHPNASLTMYVCTP

SEQ ID NO: 6392 - protein, 15 aa, Homo sapiens
ASLTMYVCTPVPHPD

SEQ ID NO: 6393 - protein, 15 aa, Homo sapiens
MYVCTPVPHPDPPMA

SEQ ID NO: 6394 - protein, 15 aa, Homo sapiens
TPVPHPDPPMALSRT

SEQ ID NO: 6395 - protein, 15 aa, Homo sapiens
LTMYVCTPVPHPDPP

SEQ ID NO: 6396 - protein, 15 aa, Homo sapiens
SLTMYVCTPVPHPDP

SEQ ID NO: 6397 - protein, 15 aa, Homo sapiens
TMYVCTPVPHPDPPM

SEQ ID NO: 6398 - protein, 15 aa, Homo sapiens
PEAHPNASLTMYVCT

SEQ ID NO: 6399 - protein, 15 aa, Homo sapiens
AHPNASLTMYVCTPV

SEQ ID NO: 6400 - protein, 15 aa, Homo sapiens
HPNASLTMYVCTPVP

SEQ ID NO: 6401 - protein, 15 aa, Homo sapiens
VCTPVPHPDPPMALS

SEQ ID NO: 6402 - protein, 15 aa, Homo sapiens
PMALSRTPTRQISSI

SEQ ID NO: 6403 - protein, 15 aa, Homo sapiens
TRQISSIDTDPPADG

SEQ ID NO: 6404 - protein, 15 aa, Homo sapiens
RTPTRQISSIDTDPP

SEQ ID NO: 6405 - protein, 15 aa, Homo sapiens
DPPMALSRTPTRQIS

SEQ ID NO: 6406 - protein, 15 aa, Homo sapiens
ISSIDTDPPADGPSN

SEQ ID NO: 6407 - protein, 15 aa, Homo sapiens
MALSRTPTRQISSID

SEQ ID NO: 6408 - protein, 15 aa, Homo sapiens
ALSRTPTRQISSIDT

SEQ ID NO: 6409 - protein, 15 aa, Homo sapiens
RQISSIDTDPPADGP

SEQ ID NO: 6410 - protein, 15 aa, Homo sapiens
PMALSRTPTRQISSS

SEQ ID NO: 6411 - protein, 15 aa, Homo sapiens
RTPTRQISSSDTDPP

SEQ ID NO: 6412 - protein, 15 aa, Homo sapiens
TRQISSSDTDPPADG

SEQ ID NO: 6413 - protein, 15 aa, Homo sapiens
MALSRTPTRQISSSD

SEQ ID NO: 6414 - protein, 15 aa, Homo sapiens
ALSRTPTRQISSSDT

SEQ ID NO: 6415 - protein, 15 aa, Homo sapiens
RQISSSDTDPPADGP

SEQ ID NO: 6416 - protein, 15 aa, Homo sapiens
PMALSRTPTRQIGSS

SEQ ID NO: 6417 - protein, 15 aa, Homo sapiens
RTPTRQIGSSDTDPP

SEQ ID NO: 6418 - protein, 15 aa, Homo sapiens
TRQIGSSDTDPPADG

SEQ ID NO: 6419 - protein, 15 aa, Homo sapiens
ALSRTPTRQIGSSDT

SEQ ID NO: 6420 - protein, 15 aa, Homo sapiens
RQIGSSDTDPPADGP

SEQ ID NO: 6421 - protein, 15 aa, Homo sapiens
SDTDPPADGPSNPLC

SEQ ID NO: 6422 - protein, 15 aa, Homo sapiens
VVSPAPSRQQALRRA

SEQ ID NO: 6423 - protein, 15 aa, Homo sapiens
VGLLTVISKGCSLNC

SEQ ID NO: 6424 - protein, 15 aa, Homo sapiens
EQCWTARIRAVGLLT

SEQ ID NO: 6425 - protein, 15 aa, Homo sapiens
SQDYYVGKKNITCCD

SEQ ID NO: 6426 - protein, 15 aa, Homo sapiens
AVLLALLMAGLALQP

SEQ ID NO: 6427 - protein, 15 aa, Homo sapiens
AAAILALLPALGLLL

SEQ ID NO: 6428 - protein, 15 aa, Homo sapiens
ALLMAGLALQPGTAL

SEQ ID NO: 6429 - protein, 15 aa, Homo sapiens
LGEQCWTARIRAVGL

SEQ ID NO: 6430 - protein, 15 aa, Homo sapiens
TALLCYSCKAQVSNE

SEQ ID NO: 6431 - protein, 15 aa, Homo sapiens
DSQDYYVGKKNITCC

SEQ ID NO: 6432 - protein, 15 aa, Homo sapiens
TCCDTDLCNASGAHA

SEQ ID NO: 6433 - protein, 15 aa, Homo sapiens
SQVWSVVSPAPSRGQ

SEQ ID NO: 6434 - protein, 15 aa, Homo sapiens
PAQWEPVLVPEAHPN

SEQ ID NO: 6435 - protein, 15 aa, Homo sapiens
FSTLNPVLRHLFPQE

SEQ ID NO: 6436 - protein, 15 aa, Homo sapiens
STLNPVLRHLFPQEA

SEQ ID NO: 6437 - protein, 15 aa, Homo sapiens
QASVPLLTHPAQWEP

SEQ ID NO: 6438 - protein, 15 aa, Homo sapiens
EPVLVPEAHPNASLT

SEQ ID NO: 6439 - protein, 15 aa, Homo sapiens
MYVCAPVPHPDPPMA

SEQ ID NO: 6440 - protein, 15 aa, Homo sapiens
SNPLCCCFHGPAFST

SEQ ID NO: 6441 - protein, 15 aa, Homo sapiens
LSQVWSVVSPAPSRG

SEQ ID NO: 6442 - protein, 15 aa, Homo sapiens
IYDLSQVWSVVSPAP

SEQ ID NO: 6443 - protein, 15 aa, Homo sapiens
TRQIGSIDTDPPADG

SEQ ID NO: 6444 - protein, 15 aa, Homo sapiens
NPVLRHLFPQEAFPA

SEQ ID NO: 6445 - protein, 15 aa, Homo sapiens
AHPIYDLSQVWSVVS

SEQ ID NO: 6446 - protein, 15 aa, Homo sapiens
THRTTTWARRTSRAV

SEQ ID NO: 6447 - protein, 15 aa, Homo sapiens
GPAFSTLNPVLRHLF

SEQ ID NO: 6448 - protein, 15 aa, Homo sapiens
LTMYVCAPVPHPDPP

SEQ ID NO: 6449 - protein, 15 aa, Homo sapiens
MALSRTPTRQIGSID

SEQ ID NO: 6450 - protein, 15 aa, Homo sapiens
SRAVTPTCATPAGPM

SEQ ID NO: 6451 - protein, 15 aa, Homo sapiens
PAGPMPCSRLPPSLR

SEQ ID NO: 6452 - protein, 15 aa, Homo sapiens
CSRLPPSLRCSLHSA

SEQ ID NO: 6453 - protein, 15 aa, Homo sapiens
PPSLRCSLHSACCSG

SEQ ID NO: 6454 - protein, 15 aa, Homo sapiens
CSGDPASYRLWGAPL

SEQ ID NO: 6455 - protein, 15 aa, Homo sapiens
LQPTLGVVPQASVPL

SEQ ID NO: 6456 - protein, 15 aa, Homo sapiens
VPLLTHPAQWEPVLV

SEQ ID NO: 6457 - protein, 15 aa, Homo sapiens
PDPPMALSRTPTRQI

SEQ ID NO: 6458 - protein, 15 aa, Homo sapiens
VWSVVSPAPSRGQAL

SEQ ID NO: 6459 - protein, 15 aa, Homo sapiens
SVVSPAPSRGQALRR

SEQ ID NO: 6460 - protein, 15 aa, Homo sapiens
RLWGAPLQPTLGVVP

SEQ ID NO: 6461 - protein, 15 aa, Homo sapiens
GAPLQPTLGVVPQAS

SEQ ID NO: 6462 - protein, 15 aa, Homo sapiens
QPTLGVVPQASVPLL

SEQ ID NO: 6463 - protein, 15 aa, Homo sapiens
ASLTMYVCAPVPHPD

SEQ ID NO: 6464 - protein, 15 aa, Homo sapiens
LRHLFPQEAFPAHPI

SEQ ID NO: 6465 - protein, 15 aa, Homo sapiens
RRTSRAVTPTCATPA

SEQ ID NO: 6466 - protein, 15 aa, Homo sapiens
AGPMPCSRLPPSLRC

SEQ ID NO: 6467 - protein, 15 aa, Homo sapiens
PQASVPLLTHPAQWE

SEQ ID NO: 6468 - protein, 15 aa, Homo sapiens
QWEPVLVPEAHPNAS

SEQ ID NO: 6469 - protein, 15 aa, Homo sapiens
PVLVPEAHPNASLTM

SEQ ID NO: 6470 - protein, 15 aa, Homo sapiens
PNASLTMYVCAPVPH

SEQ ID NO: 6471 - protein, 15 aa, Homo sapiens
CAPVPHPDPPMALSR

SEQ ID NO: 6472 - protein, 15 aa, Homo sapiens
IGSIDTDPPADGPSN

SEQ ID NO: 6473 - protein, 15 aa, Homo sapiens
TTTWARRTSRAVTPT

SEQ ID NO: 6474 - protein, 15 aa, Homo sapiens
PASYRLWGAPLQPTL

SEQ ID NO: 6475 - protein, 15 aa, Homo sapiens
PAGPMPCSRLLPSLR

SEQ ID NO: 6476 - protein, 15 aa, Homo sapiens
CSRLLPSLRCSLHSA

SEQ ID NO: 6477 - protein, 15 aa, Homo sapiens
LPSLRCSLHSACCSG

SEQ ID NO: 6478 - protein, 15 aa, Homo sapiens
SRLLPSLRCSLHSAC

SEQ ID NO: 6479 - protein, 15 aa, Homo sapiens
AGPMPCSRLLPSLRC

SEQ ID NO: 6480 - protein, 15 aa, Homo sapiens
ATPAGPMPCSRLLPS

SEQ ID NO: 6481 - protein, 15 aa, Homo sapiens
MPCSRLLPSLRCSLH

SEQ ID NO: 6482 - protein, 15 aa, Homo sapiens
PMPCSRLLPSLRCSL

SEQ ID NO: 6483 - protein, 15 aa, Homo sapiens
PCSRLLPSLRCSLHS

SEQ ID NO: 6484 - protein, 15 aa, Homo sapiens
CSGDPASSRLWGAPL

SEQ ID NO: 6485 - protein, 15 aa, Homo sapiens
SRLWGAPLQPTLGVV

SEQ ID NO: 6486 - protein, 15 aa, Homo sapiens
CSLHSACCSGDPASS

SEQ ID NO: 6487 - protein, 15 aa, Homo sapiens
SLHSACCSGDPASSR

SEQ ID NO: 6488 - protein, 15 aa, Homo sapiens
LHSACCSGDPASSRL

SEQ ID NO: 6489 - protein, 15 aa, Homo sapiens
HSACCSGDPASSRLW

SEQ ID NO: 6490 - protein, 15 aa, Homo sapiens
SGDPASSRLWGAPLQ

SEQ ID NO: 6491 - protein, 15 aa, Homo sapiens
GDPASSRLWGAPLQP

SEQ ID NO: 6492 - protein, 15 aa, Homo sapiens
DPASSRLWGAPLQPT

SEQ ID NO: 6493 - protein, 15 aa, Homo sapiens
ASSRLWGAPLQPTLG

SEQ ID NO: 6494 - protein, 15 aa, Homo sapiens
SSRLWGAPLQPTLGV

SEQ ID NO: 6495 - protein, 15 aa, Homo sapiens
VPLLTDPAQWEPVLV

SEQ ID NO: 6496 - protein, 15 aa, Homo sapiens
PQASVPLLTDPAQWE

SEQ ID NO: 6497 - protein, 15 aa, Homo sapiens
QASVPLLTDPAQWEP

SEQ ID NO: 6498 - protein, 15 aa, Homo sapiens
LGVVPQASVPLLTDP

SEQ ID NO: 6499 - protein, 15 aa, Homo sapiens
VPQASVPLLTDPAQW

SEQ ID NO: 6500 - protein, 15 aa, Homo sapiens
TDPAQWEPVLVPEAH

SEQ ID NO: 6501 - protein, 15 aa, Homo sapiens
TLGVVPQASVPLLTD

SEQ ID NO: 6502 - protein, 15 aa, Homo sapiens
VVPQASVPLLTDPAQ

SEQ ID NO: 6503 - protein, 15 aa, Homo sapiens
SVPLLTDPAQWEPVL

SEQ ID NO: 6504 - protein, 15 aa, Homo sapiens
VPLLTDLAQWEPVLV

SEQ ID NO: 6505 - protein, 15 aa, Homo sapiens
PQASVPLLTDLAQWE

SEQ ID NO: 6506 - protein, 15 aa, Homo sapiens
QASVPLLTDLAQWEP

SEQ ID NO: 6507 - protein, 15 aa, Homo sapiens
LAQWEPVLVPEAHPN

SEQ ID NO: 6508 - protein, 15 aa, Homo sapiens
QASVPLLTHLAQWEP

SEQ ID NO: 6509 - protein, 15 aa, Homo sapiens
VPLLTHLAQWEPVLV

SEQ ID NO: 6510 - protein, 15 aa, Homo sapiens
PQASVPLLTHLAQWE

SEQ ID NO: 6511 - protein, 15 aa, Homo sapiens
MYVCTPVPHPDPPMA

SEQ ID NO: 6512 - protein, 15 aa, Homo sapiens
LTMYVCTPVPHPDPP

SEQ ID NO: 6513 - protein, 15 aa, Homo sapiens
ASLTMYVCTPVPHPD

SEQ ID NO: 6514 - protein, 15 aa, Homo sapiens
PNASLTMYVCTPVPH

SEQ ID NO: 6515 - protein, 15 aa, Homo sapiens
CTPVPHPDPPMALSR

SEQ ID NO: 6516 - protein, 15 aa, Homo sapiens
NASLTMYVCTPVPHP

SEQ ID NO: 6517 - protein, 15 aa, Homo sapiens
TRQISSIDTDPPADG

SEQ ID NO: 6518 - protein, 15 aa, Homo sapiens
MALSRTPTRQISSID

SEQ ID NO: 6519 - protein, 15 aa, Homo sapiens
ISSIDTDPPADGPSN

SEQ ID NO: 6520 - protein, 15 aa, Homo sapiens
ALSRTPTRQISSIDT

SEQ ID NO: 6521 - protein, 15 aa, Homo sapiens
SSIDTDPPADGPSNP

SEQ ID NO: 6522 - protein, 15 aa, Homo sapiens
MALSRTPTRQISSSD

SEQ ID NO: 6523 - protein, 15 aa, Homo sapiens
TRQISSSDTDPPADG

SEQ ID NO: 6524 - protein, 15 aa, Homo sapiens
ALSRTPTRQISSSDT

SEQ ID NO: 6525 - protein, 15 aa, Homo sapiens
SSSDTDPPADGPSNP

SEQ ID NO: 6526 - protein, 15 aa, Homo sapiens
PMALSRTPTRQISSS

SEQ ID NO: 6527 - DNA, 1020 bp, Homo sapiens
tttgaggccatataaagtcacctgaggccctctccaccacagcccaccagtgaccatgaaggctgtgctgcttgccctgttgatggcaggcttggccctgcagccaggcactgccctgctgtgctactcctgcaaagcccaggtgagcaacgaggactgcctgcaggtggagaactgcacccagctgggggagcagtgctggaccgcgcgcatccgcgcagttggcctcctgaccgtcatcagcaaaggctgcagcttgaactgcgtggatgactcacaggactactacgtgggcaagaagaacatcacgtgctgtgacaccgacttgtgcaacgccagcggggcccatgccctgcagccggctgccgccatccttgcgctgctccctgcactcggcctgctgctctggggacccggccagctataggctctggggggccccgctgcagcccacactgggtgtggtgccccaggcctctgtgccactcctcacacacccggcccagtgggagcctgtcctggttcctgaggcacatcctaacgcaagtctgaccatgtatgtctgcgcccctgtcccccaccctgaccctcccatggccctctccaggactcccacccggcagatcggctctattgacacagatccgcctgcagatggcccctccaaccctctctgctgctgtttccatggcccagcattctccacccttaaccctgtgctcaggcacctcttcccccaggaagccttccctgcccaccccatctatgacttgagccaggtctggtccgtggtgtcccccgcacccagcaggggacaggcactcaggagggcccggtaaaggctgagatgaagtggactgagtagaactggaggacaggagtcgacgtgagttcctgggagtctccagagatggggcctggaggcctggaggaaggggccaggcctcacattcgtggggctccctgaatggcagcctcagcacagcgtaggcccttaataaacacctgttggataagcca

SEQ ID NO: 6528 - DNA, 1005 bp, Homo sapiens
agtcacctgaggccctctccaccacagcccaccagtgaccatgaaggctgtgctgcttgccctgttgatggcaggcttggccctgcagccaggcactgccctgctgtgctactcctgcaaagcccaggtgagcaacgaggactgcctgcaggtggagaactgcacccagctgggggagcagtgctggaccgcgcgcatccgcgcagttggcctcctgaccgtcatcagcaaaggctgcagcttgaactgcgtggatgactcacaggactactacgtgggcaagaagaacatcacgtgctgtgacaccgacttgtgcaacgccagcggggcccatgccctgcagccggctgccgccatccttgcgctgctccctgcactcggcctgctgctctggggacccggccagctataggctctggggggccccgctgcagcccacactgggtgtggtgccccaggcctctgtgccactcctcacacacccggcccagtgggagcctgtcctggttcctgaggcacatcctaacgcaagtctgaccatgtatgtctgcgcccctgtcccccaccctgaccctcccatggccctctccaggactcccacccggcagatcggctctattgacacagatccgcctgcagatggcccctccaaccctctctgctgctgtttccatggcccagcattctccacccttaaccctgtgctcaggcacctcttcccccaggaagccttccctgcccaccccatctatgacttgagccaggtctggtccgtggtgtcccccgcacccagcaggggacaggcactcaggagggcccggtaaaggctgagatgaagtggactgagtagaactggaggacaggagtcgacgtgagttcctgggagtctccagagatggggcctggaggcctggaggaaggggccaggcctcacattcgtggggctccctgaatggcagcctcagcacagcgtaggcccttaataaacacctgttggataagcca

SEQ ID NO: 6529 - DNA, 985 bp, Homo sapiens
  misc_feature (0)...(0): n = a,c,t,or g
agggagaggcagtgaccatgaaggctgtgctgcttgccctgttgatggcaggcttggccctgcagccaggcactgccctgctgtgctactcctgcaaagcccaggtgagcaacgaggactgcctgcaggtggagaactgcacccagctgggggagcagtgctggaccgcgcgcatccgcgcagttggcctcctgaccgtcatcagcaaaggctgcagcttgaactgcgtggatgactcacaggactactacgtgggcaagaagaacatcacgtgctgtgacaccgacttgtgcaacgccagcggggcccatgccctgcagccggctgccgccatccttgcgctgctccctgcactcggcctgctgctctggggacccggccagctataggctctggggggccccgctgcagcccacactgggtgtggtgccccaggcctttgtgccactcctcacagaacctggcccagtgggagcctgtcctggttcctgaggcacatcctaacgcaagtttgaccatgtatgtttgcaccccttttccccnaaccctgaccttcccatgggccttttccaggattcccacccggcagatcagttttagtgacacagatccgcctgcagatggcccctccaaccctttctgttgctgtttccatggcccagcattttccacccttaaccctgtgttcaggcacttcttcccccaggaagccttccctgcccaccccatttatgaattgagccaggtttggtccgtggtgtcccccgcacccagcaggggacaggcaatcaggagggcccagtaaaggctgagatgaagtggactgagtagaactggaggacaagagttgacgtgagttcctgggagtttccagagatggggcctggaggcctggaggaaggggccaggcctcacatttgtggggctcccgaatggcagcctgagcacagcgtaggcccttaataaacacctgttggataagcca

SEQ ID NO: 6530 - protein, 123 aa, Homo sapiens; identical to SEQ ID NO: 150

SEQ ID NO: 6531 - protein, 123 aa, Homo sapiens; identical to SEQ ID NO: 150

SEQ ID NO: 6532 - protein, 123 aa, Homo sapiens; identical to SEQ ID NO: 150

SEQ ID NO: 6533 - DNA, 888 bp, Homo sapiens
tttgaggccatataaagtcacctgaggccctctccaccacagcccaccagtgaccatgaaggctgtgctgcttgccctgttgatggcaggcttggccctgcagccaggcactgccctgctgtgctactcctgcaaagcccaggcgcagttggcctcctgaccgtcatcagcaaaggctgcagcttgaactgcgtggatgactcacaggactactacgtgggcaagaagaacatcacgtgctgtgacaccgacttgtgcactcggcctgctgctctggggacccggccagctataggctctggggggccccgctgcagcccacactgggtgtggtgccccaggcctctgtgccactcctcacacacccggcccagtgggagcctgtcctggttcctgaggcacatcctaacgcaagtctgaccatgtatgtctgcgcccctgtcccccaccctgaccctcccatggccctctccaggactcccacccggcagatcggctctattgacacagatccgcctgcagatggcccctccaaccctctctgctgctgtttccatggcccagcattctccacccttaaccctgtgctcaggcacctcttcccccaggaagccttccctgcccaccccatctatgacttgagccaggtctggtccgtggtgtcccccgcacccagcaggggacaggcactcaggagggcccggtaaaggctgagatgaagtggactgagtagaactggaggacaggagtcgacgtgagttcctgggagtctccagagatggggcctggaggcctggaggaaggggccaggcctcacattcgtggggctccctgaatggcagcctcagcacagcgtaggcccttaataaacacctgttggataagcca

SEQ ID NO: 6534 - DNA, 1020 bp, Homo sapiens; identical to SEQ ID NO: 6527

SEQ ID NO: 6535 - DNA, 888 bp, Homo sapiens; identical to SEQ ID NO: 6533

SEQ ID NO: 6536 - protein, 94 aa, Homo sapiens
MYVCAPVPHPDPPMALSRTPTRQIGSIDTDPPADGPSNPLCCCFHGPAFSTLNPVLRHLFPQEAFPAHPIYDLSQVWSVVSPAPSRGQALRRAR

SEQ ID NO: 6537 - DNA, 1174 bp, Homo sapiens
gacagtgaaccctgcgctgaaggcgttggggctcctgcagttctggggcagccacaggcgcccagggtttcgtgccgatcagcccaggacggtcttcccggtgcagtttctgatgcggggagggcagtgctgccttccggtcaccaggaccagtgctcagcccgcctgcttgacccccttacttagctggggtccaatccatacccaatttagatgattcagacgatgggatttgaaacttttgaactgggtgcgacttaagcactgccctgctgtgctactcctgcaaagcccaggtgagcaacgaggactgcctgcaggtggagaactgcacccagctgggggagcagtgctggaccgcgcgcatccgcgcagttggcctcctgaccgtcatcagcaaaggctgcagcttgaactgcgtggatgactcacaggactactacgtgggcaagaagaacatcacgtgctgtgacaccgacttgtgcaacgccagcggggcccatgccctgcagccggctgccgccatccttgcgctgctccctgcactcggcctgctgctctggggacccggccagctataggctctggggggccccgctgcagcccacactgggtgtggtgccccaggcctctgtgccactcctcacacacccggcccagtgggagcctgtcctggttcctgaggcacatcctaacgcaagtctgaccatgtatgtctgcgcccctgtcccccaccctgaccctcccatggccctctccaggactcccacccggcagatcggctctattgacacagatccgcctgcagatggcccctccaaccctctctgctgctgtttccatggcccagcattctccacccttaaccctgtgctcaggcacctcttcccccaggaagccttccctgcccaccccatctatgacttgagccaggtctggtccgtggtgtcccccgcacccagcaggggacaggcactcaggagggcccggtaaaggctgagatgaagtggactgagtagaactggaggacaggagtcgacgtgagttcctgggagtctccagagatggggcctggaggcctggaggaaggggccaggcctcacattcgtggggctccctgaatggcagcctcagcacagcgtaggcccttaataaacacctgttggataagcca

SEQ ID NO: 6538 - DNA, 1020 bp, Homo sapiens; identical to SEQ ID NO: 6527

SEQ ID NO: 6539 - DNA, 1133 bp, Homo sapiens
tctggggcagccacaggcgcccagggtttcgtgccgatcagcccaggacggtcttcccggtgcagtttctgatgcggggagggcagtgctgccttccggtcaccaggaccagtgctcagcccgcctgcttgacccccttacttagctggggtccaatccatacccaatttagatgattcagacgatgggatttgaaacttttgaactgggtgcgacttaagcactgccctgctgtgctactcctgcaaagcccaggtgagcaacgaggactgcctgcaggtggagaactgcacccagctgggggagcagtgctggaccgcgcgcatccgcgcagttggcctcctgaccgtcatcagcaaaggctgcagcttgaactgcgtggatgactcacaggactactacgtgggcaagaagaacatcacgtgctgtgacaccgacttgtgcaacgccagcggggcccatgccctgcagccggctgccgccatccttgcgctgctccctgcactcggcctgctgctctggggacccggccagctataggctctggggggccccgctgcagcccacactgggtgtggtgccccaggcctctgtgccactcctcacacacccggcccagtgggagcctgtcctggttcctgaggcacatcctaacgcaagtctgaccatgtatgtctgcgcccctgtcccccaccctgaccctcccatggccctctccaggactcccacccggcagatcggctctattgacacagatccgcctgcagatggcccctccaaccctctctgctgctgtttccatggcccagcattctccacccttaaccctgtgctcaggcacctcttcccccaggaagccttccctgcccaccccatctatgacttgagccaggtctggtccgtggtgtcccccgcacccagcaggggacaggcactcaggagggcccggtaaaggctgagatgaagtggactgagtagaactggaggacaggagtcgacgtgagttcctgggagtctccagagatggggcctggaggcctggaggaaggggccaggcctcacattcgtggggctccctgaatggcagcctcagcacagcgtaggcccttaataaacacctgttggataagcca

SEQ ID NO: 6540 - protein, 189 aa, Homo sapiens
MTHRTTTWARRTSRAVTPTCATPAGPMPCSRLPPSLRCSLHSACCSGDPASYRLWGAPLQPTLGVVPQASVPLLTHPAQWEPVLVPEAHPNASLTMYVCAPVPHPDPPMALSRTPTRQIGSIDTDPPADGPSNPLCCCFHGPAFSTLNPVLRHLFPQEAFPAHPIYDLSQVWSVVSPAPSRGQALRRAR

SEQ ID NO: 6541 - DNA, 1660 bp, Homo sapiens
gacagtgaaccctgcgctgaaggcgttggggctcctgcagttctggggcagccacaggcgcccagggtttcgtgccgatcagcccaggacggtcttcccggtgcagtttctgatgcggggagggcagtgctgccttccggtcaccaggaccagtgctcagcccgcctgcttgacccccttacttagctggggtccaatccatacccaatttagatgattcagacgatgggatttgaaacttttgaactgggtgcgacttaagcactgccctgctgtgctactcctgcaaagcccaggtgagcaacgaggactgcctgcaggtggagaactgcacccagctgggggagcagtgctggaccgcgcgcatccgtgagtggggggacgacagccgccaggcctaggtctctgccactgaactattaatctttctggccatctgtccgcatctgtgtgctgttttccttccacctgtccccgacccgtcccgcacctgcacccccaacaatcacccagcatctgtccctccagccatcctcctccatctgccactcctccactcatctgtccctccccatcctccatcttccactcctccacccatctgtccctccccatccctgagctcacttactcactcaccccatttctgacgctcagcgggtggtccatctgcctcggacatctggatagggctgagaccagggccgagaccaggccctcgcactgcttgcaatcctgaggccagcccagggggactctagagcattaggcagggtgggacaggaggaggcctggggcaggtcaggcaggtgagcacacagggcagccccatccccggatcccgctgctccccaggcgcagttggcctcctgaccgtcatcagcaaaggctgcagcttgaactgcgtggatgactcacaggactactacgtgggcaagaagaacatcacgtgctgtgacaccgacttgtgcaacgccagcggggcccatgccctgcagccggctgccgccatccttgcgctgctccctgcactcggcctgctgctctggggacccggccagctataggctctggggggccccgctgcagcccacactgggtgtggtgccccaggcctctgtgccactcctcacacacccggcccagtgggagcctgtcctggttcctgaggcacatcctaacgcaagtctgaccatgtatgtctgcgcccctgtcccccaccctgaccctcccatggccctctccaggactcccacccggcagatcggctctattgacacagatccgcctgcagatggcccctccaaccctctctgctgctgtttccatggcccagcattctccacccttaaccctgtgctcaggcacctcttcccccaggaagccttccctgcccaccccatctatgacttgagccaggtctggtccgtggtgtcccccgcacccagcaggggacaggcactcaggagggcccggtaaaggctgagatgaagtggactgagtagaactggaggacaggagtcgacgtgagttcctgggagtctccagagatggggcctggaggcctggaggaaggggccaggcctcacattcgtggggctccctgaatggcagcctcagcacagcgtaggcccttaataaacacctgttggataagcca

SEQ ID NO: 6542 - DNA, 1020 bp, Homo sapiens; identical to SEQ ID NO: 6527

SEQ ID NO: 6543 - DNA, 1619 bp, Homo sapiens
tctggggcagccacaggcgcccagggtttcgtgccgatcagcccaggacggtcttcccggtgcagtttctgatgcggggagggcagtgctgccttccggtcaccaggaccagtgctcagcccgcctgcttgacccccttacttagctggggtccaatccatacccaatttagatgattcagacgatgggatttgaaacttttgaactgggtgcgacttaagcactgccctgctgtgctactcctgcaaagcccaggtgagcaacgaggactgcctgcaggtggagaactgcacccagctgggggagcagtgctggaccgcgcgcatccgtgagtggggggacgacagccgccaggcctaggtctctgccactgaactattaatctttctggccatctgtccgcatctgtgtgctgttttccttccacctgtccccgacccgtcccgcacctgcacccccaacaatcacccagcatctgtccctccagccatcctcctccatctgccactcctccactcatctgtccctccccatcctccatcttccactcctccacccatctgtccctccccatccctgagctcacttactcactcaccccatttctgacgctcagcgggtggtccatctgcctcggacatctggatagggctgagaccagggccgagaccaggccctcgcactgcttgcaatcctgaggccagcccagggggactctagagcattaggcagggtgggacaggaggaggcctggggcaggtcaggcaggtgagcacacagggcagccccatccccggatcccgctgctccccaggcgcagttggcctcctgaccgtcatcagcaaaggctgcagcttgaactgcgtggatgactcacaggactactacgtgggcaagaagaacatcacgtgctgtgacaccgacttgtgcaacgccagcggggcccatgccctgcagccggctgccgccatccttgcgctgctccctgcactcggcctgctgctctggggacccggccagctataggctctggggggccccgctgcagcccacactgggtgtggtgccccaggcctctgtgccactcctcacacacccggcccagtgggagcctgtcctggttcctgaggcacatcctaacgcaagtctgaccatgtatgtctgcgcccctgtcccccaccctgaccctcccatggccctctccaggactcccacccggcagatcggctctattgacacagatccgcctgcagatggcccctccaaccctctctgctgctgtttccatggcccagcattctccacccttaaccctgtgctcaggcacctcttcccccaggaagccttccctgcccaccccatctatgacttgagccaggtctggtccgtggtgtcccccgcacccagcaggggacaggcactcaggagggcccggtaaaggctgagatgaagtggactgagtagaactggaggacaggagtcgacgtgagttcctgggagtctccagagatggggcctggaggcctggaggaaggggccaggcctcacattcgtggggctccctgaatggcagcctcagcacagcgtaggcccttaataaacacctgttggataagcca

SEQ ID NO: 6544 - protein, 189 aa, Homo sapiens; identical to SEQ ID NO: 6540

SEQ ID NO: 6545 - DNA, 1020 bp, Homo sapiens; identical to SEQ ID NO: 6527

SEQ ID NO: 6546 - protein, 114 aa, Homo sapiens
MAGLALQPGTALLCYSCKAQVSNEDCLQVENCTQLGEQCWTARIRAVGLLTVISKGCSLNCVDDSQDYYVGKKNITCCDTDLCNASGAHALQPAAAILALLPALGLLLWGPGQL

SEQ ID NO: 6547 - protein, 189 aa, Homo sapiens
MTHRTTTWARRTSRAVTPTCATPAGPMPCSRLLPSLRCSLHSACCSGDPASYRLWGAPLQPTLGVVPQASVPLLTHPAQWEPVLVPEAHPNASLTMYVCAPVPHPDPPMALSRTPTRQIGSIDTDPPADGPSNPLCCCFHGPAFSTLNPVLRHLFPQEAFPAHPIYDLSQVWSVVSPAPSRGQALRRAR

SEQ ID NO: 6548 - protein, 189 aa, Homo sapiens
MTHRTTTWARRTSRAVTPTCATPAGPMPCSRLPPSLRCSLHSACCSGDPASSRLWGAPLQPTLGVVPQASVPLLTHPAQWEPVLVPEAHPNASLTMYVCAPVPHPDPPMALSRTPTRQIGSIDTDPPADGPSNPLCCCFHGPAFSTLNPVLRHLFPQEAFPAHPIYDLSQVWSVVSPAPSRGQALRRAR

SEQ ID NO: 6549 - protein, 189 aa, Homo sapiens
MTHRTTTWARRTSRAVTPTCATPAGPMPCSRLPPSLRCSLHSACCSGDPASYRLWGAPLQPTLGVVPQASVPLLTDPAQWEPVLVPEAHPNASLTMYVCAPVPHPDPPMALSRTPTRQIGSIDTDPPADGPSNPLCCCFHGPAFSTLNPVLRHLFPQEAFPAHPIYDLSQVWSVVSPAPSRGQALRRAR

SEQ ID NO: 6550 - protein, 189 aa, Homo sapiens
MTHRTTTWARRTSRAVTPTCATPAGPMPCSRLPPSLRCSLHSACCSGDPASYRLWGAPLQPTLGVVPQASVPLLTHLAQWEPVLVPEAHPNASLTMYVCAPVPHPDPPMALSRTPTRQIGSIDTDPPADGPSNPLCCCFHGPAFSTLNPVLRHLFPQEAFPAHPIYDLSQVWSVVSPAPSRGQALRRAR

SEQ ID NO: 6551 - protein, 189 aa, Homo sapiens
MTHRTTTWARRTSRAVTPTCATPAGPMPCSRLPPSLRCSLHSACCSGDPASYRLWGAPLQPTLGVVPQASVPLLTHPAQWEPVLVPEAHPNASLTMYVCTPVPHPDPPMALSRTPTRQIGSIDTDPPADGPSNPLCCCFHGPAFSTLNPVLRHLFPQEAFPAHPIYDLSQVWSVVSPAPSRGQALRRAR

SEQ ID NO: 6552 - protein, 189 aa, Homo sapiens
MTHRTTTWARRTSRAVTPTCATPAGPMPCSRLPPSLRCSLHSACCSGDPASYRLWGAPLQPTLGVVPQASVPLLTHPAQWEPVLVPEAHPNASLTMYVCAPVPHPDPPMALSRTPTRQISSIDTDPPADGPSNPLCCCFHGPAFSTLNPVLRHLFPQEAFPAHPIYDLSQVWSVVSPAPSRGQALRRAR

SEQ ID NO: 6553 - protein, 189 aa, Homo sapiens
MTHRTTTWARRTSRAVTPTCATPAGPMPCSRLPPSLRCSLHSACCSGDPASYRLWGAPLQPTLGVVPQASVPLLTHPAQWEPVLVPEAHPNASLTMYVCAPVPHPDPPMALSRTPTRQIGSSDTDPPADGPSNPLCCCFHGPAFSTLNPVLRHLFPQEAFPAHPIYDLSQVWSVVSPAPSRGQALRRAR

SEQ ID NO: 6554 - protein, 189 aa, Homo sapiens
MTHRTTTWARRTSRAVTPTCATPAGPMPCSRLPPSLRCSLHSACCSGDPASYRLWGAPLQPTLGVVPQASVPLLTHPAQWEPVLVPEAHPNASLTMYVCAPVPHPDPPMALSRTPTRQIGSIDTDPPADGPSNPLCCCFHGPAFSTLNPVLRHLFPQEAFPAHPIYDLSQVWSVVSPAPSRGQALRRAQ

SEQ ID NO: 6555 - protein, 187 aa, Artificial Sequence
  Comparison PSCA variants
MTHRTTTWARRTSRAVTPTCATPAGPMPCSRLPSLRCSLHSACCSGDPASRLWGAPLQPTLGVVPQASVPLLTHPAQWEPVLVPEAHPNASLTMYVCAPVPHPDPPMALSRTPTRQIGSIDTDPPADGPSNPLCCCFHGPAFSTLNPVLRHLFPQEAFPAHPIYDLSQVWSVVSPAPSRGQALRRAR

SEQ ID NO: 6556 - protein, 189 aa, Homo sapiens
MTHRTTTWARRTSRAVTPTCATPAGPMPCSRLLPSLRCSLHSACCSGDPASSRLWGAPLQPTLGVVPQASVPLLTHPAQWEPVLVPEAHPNASLTMYVCAPVPHPDPPMALSRTPTRQIGSIDTDPPADGPSNPLCCCFHGPAFSTLNPVLRHLFPQEAFPAHPIYDLSQVWSVVSPAPSRGQALRRAR

1. A composition that comprises, consists essentially of, or consists of:
a) a peptide of eight, nine, ten, or eleven contiguous amino acids of a protein of FIG. 2;
b) a peptide of Tables VIII-XXI;
c) a peptide of Tables XXII to XLV; or,
d) a peptide of Tables XLVI to XLIX.

2. A composition of claim 1 that comprises a protein related to a protein of FIG. 2.

3. A protein of claim 2 that is at least 90, 91, 92, 93, 94, 95, 96, 97, 98, or 99% homologous to an entire amino acid sequence shown in FIG. 2.

4. A composition of claim 1 wherein the substance comprises a CTL polypeptide or an analog thereof, from the amino acid sequence of a protein of FIG. 2.

5. A composition of claim 4 further limited by a proviso that the epitope is not an entire amino acid sequence of FIG. 2.

6. A composition of claim 1 further limited by a proviso that the polypeptide is not an entire amino acid sequence of a protein of FIG. 2.

7. A composition of claim 1 that comprises an antibody polypeptide epitope from an amino acid sequence of FIG. 2.

8. A composition of claim 7 further limited by a proviso that the epitope is not an entire amino acid sequence of FIG. 2.

9. A composition of claim 7 wherein the antibody epitope comprises a peptide region of at least 5 amino acids of FIG. 2 in any whole number increment up to the end of said peptide, wherein the epitope comprises an amino acid position selected from:
a) an amino acid position having a value greater than 0.5 in the Hydrophilicity profile of FIG. 5,
b) an amino acid position having a value less than 0.5 in the Hydropathicity profile of FIG. 6;
c) an amino acid position having a value greater than 0.5 in the Percent Accessible Residues profile of FIG. 7;
d) an amino acid position having a value greater than 0.5 in the Average Flexibility profile of FIG. 8;
e) an amino acid position having a value greater than 0.5 in the Beta-turn profile of FIG. 9;
f) a combination of at least two of a) through e);
g) a combination of at least three of a) through e);
h) a combination of at least four of a) through e); or
i) a combination of five of a) through e).

10. A polynucleotide that encodes a protein of claim 1.

11. A polynucleotide of claim 10 that comprises a nucleic acid molecule set forth in FIG. 2.

12. A polynucleotide of claim 10 further limited by a proviso that the encoded protein is not an entire amino acid sequence of FIG. 2.

13. A composition of claim 11 wherein the substance comprises a polynucleotide that comprises a coding sequence of a nucleic acid sequence of FIG. 2.

14. A polynucleotide of claim 11 that further comprises an additional nucleotide sequence that encodes an additional peptide of claim 1.

15. A composition comprising a polynucleotide that is fully complementary to a polynucleotide of claim 10.

16. A method of generating a mammalian immune response directed to a protein of FIG. 2, the method comprising:
exposing cells of the mammal's immune system to a portion of
a) a PSCA-related protein and/or
b) a nucleotide sequence that encodes said protein,
whereby an immune response is generated to said protein.

17. A method of generating an immune response of claim 16, said method comprising:
providing a PSCA-related protein that comprises at least one T cell or at least one B cell epitope; and,
contacting the epitope with a mammalian immune system T cell or B cell respectively, whereby the T cell or B cell is activated.

18. A method of claim 17 wherein the immune system cell is a B cell, whereby the induced B cell generates antibodies that specifically bind to the PSCA-related protein.

19. A method of claim 17 wherein the immune system cell is a T cell that is a cytotoxic T cell (CTL), whereby the activated CTL kills an autologous cell that expresses the PSCA-related protein.

20. A method of claim 17 wherein the immune system cell is a T cell that is a helper T cell (HTL), whereby the activated HTL secretes cytokines that facilitate the cytotoxic activity of a cytotoxic T cell (CTL) or the antibody-producing activity of a B cell.

21. A method for detecting, in a sample, the presence of a PSCA-related protein or a PSCA-related polynucleotide, comprising steps of:
contacting the sample with a substance that specifically binds to the PSCA-related protein or to the PSCA-related polynucleotide, respectively; and,
determining that there is a complex of the substance with the PSCA-related protein or the substance with the PSCA-related polynucleotide, respectively.

22. A method of claim 21 for detecting the presence of a PSCA-related protein in a sample comprising steps of:
contacting the sample with an antibody or fragment thereof either of which specifically bind to the PSCA-related protein; and,
determining that there is a complex of the antibody or fragment thereof and the PSCA-related protein.

23. A method of claim 21 further comprising a step of:
taking the sample from a patient who has or who is suspected of having cancer.

24. A method of claim 21 for detecting the presence of a protein of FIG. 2 mRNA in a sample comprising:
producing cDNA from the sample by reverse transcription using at least one primer;
amplifying the cDNA so produced using PSCA polynucleotides as sense and antisense primers, wherein the PSCA polynucleotides used as the sense and antisense primers serve to amplify a PSCA cDNA; and,
detecting the presence of the amplified PSCA cDNA.

25. A method of claim 21 for monitoring one or more PSCA gene products in a biological sample from a patient who has or who is suspected of having cancer, the method comprising:
determining the status of one or more PSCA gene products expressed by cells in a tissue sample from an individual;
comparing the status so determined to the status of one or more PSCA gene products in a corresponding normal sample; and,
identifying the presence of one or more aberrant gene products of PSCA in the sample relative to the normal sample.

26. The method of claim 25 further comprising a step of determining if there are one or more elevated gene products of a PSCA mRNA or a PSCA protein, whereby the presence of one or more elevated gene products in the test sample relative to the normal tissue sample indicates the presence or status of a cancer.

27. A method of claim 26 wherein the cancer occurs in a tissue set forth in Table I.

28. A composition comprising:
a substance that a) modulates the status of a protein of FIG. 2, or b) a molecule that is modulated by a protein of FIG. 2, whereby the status of a cell that expresses a protein of FIG. 2 is modulated.

29. A composition of claim 28, further comprising a physiologically acceptable carrier.

30. A pharmaceutical composition that comprises the composition of claim 28 in a human unit dose form.

31. A composition of claim 28 wherein the substance comprises an antibody or fragment thereof that specifically binds to a protein of FIG. 2.

32. An antibody or fragment thereof of claim 31, which is monoclonal.

33. An antibody of claim 31, which is a human antibody, a humanized antibody or a chimeric antibody.

34. A non-human transgenic animal that produces an antibody of claim 31.

35. A hybridoma that produces an antibody of claim 32.

36. A method of delivering a cytotoxic agent or a diagnostic agent to a cell that expresses a protein of FIG. 2, said method comprising:
providing the cytotoxic agent or the diagnostic agent conjugated to an antibody or fragment thereof of claim 4; and, exposing the cell to the antibody-agent or fragment-agent conjugate.

37. A composition of claim 28 wherein the substance comprises a polynucleotide that encodes an antibody or fragment thereof, either of which immunospecifically bind to a protein of FIG. 2.

38. A composition of claim 28 wherein the substance comprises a) a ribozyme that cleaves a polynucleotide having a PSCA coding sequence, or b) a nucleic acid molecule that encodes the ribozyme; and, a physiologically acceptable carrier.

39. A composition of claim 28 wherein the substance comprises human T cells, wherein said T cells specifically recognize a PSCA peptide subsequence in the context of a particular HLA molecule.

40. A method of inhibiting growth of cancer cells that express a protein of FIG. 2, the method comprising:
administering to the cells the composition of claim 28.

41. A method of claim 40 of inhibiting growth of cancer cells that express a protein of FIG. 2, the method comprising steps of:
administering to said cells an antibody or fragment thereof, either of which specifically bind to a PSCA-related protein.

42. A method of claim 40 of inhibiting growth of cancer cells that express a protein of FIG. 2, the method comprising steps of:
administering to said cells a PSCA-related protein.

43. A method of claim 40 of inhibiting growth of cancer cells that express a protein of FIG. 2, the method comprising steps of:
administering to said cells a polynucleotide comprising a coding sequence for a PSCA-related protein or comprising a polynucleotide complementary to a coding sequence for a PSCA-related protein.

44. A method of claim 40 of inhibiting growth of cancer cells that express a protein of FIG. 2, the method comprising steps of:
administering to said cells a ribozyme that cleaves a polynucleotide that encodes a protein of FIG. 2.

45. A method of claim 40 of inhibiting growth of cancer cells that express a protein of FIG. 2 and a particular HLA molecule, the method comprising steps of:
administering human T cells to said cancer cells, wherein said T cells specifically recognize a peptide subsequence of a protein of FIG. 2 while the subsequence is in the context of the particular HLA molecule.

46. A method of claim 40, the method comprising steps of:
administering a vector that delivers a nucleotide that encodes a single chain monoclonal antibody, whereby the encoded single chain antibody is expressed intracellularly within cancer cells that express a protein of FIG. 2.
